United States Patent Application Publication US 2008/0083042 A1 - sequence listing, part 3

SEQ ID NO: 7260 - DNA, 736 bp, Zea mays
tggatataggcacgtggacacagctgcccaatacggagtagagaaagaggtgcacatcaaaataaaaaccatgaatcatgtctctgtaatcagccctcccaacgtcccaagcagcaggtggtgacagtatatgtggtaaaacatcctgtgtcgaccaggtcggtagaggacttaaagctgcgatggagggcgggatcaacaggaaagatttgtttgtgacgtcgaagctatggtacctacactacacgcagggagtttataccgttgcgccgctgaatacctgagtacgtatattgctccagtctccgaaatttgatcgatattttgtctgctttttcaggtgcaccgagctggctcctgatagggttcgaccagcactccagaaaacactcaaggacttgcagctggattacctggatctctaccttgtaagaaaccaaaagcactgacttttttattgtttcaacttccttactgttatctgaagaaaaaaacaaaattttgtatgctgagggacaggttacaacttatagctactaaaacgcaatatgttgtttctgatagaatagaaccactatatctatatgcttgcattgacaaatgaacgcacgcagatccactggcccttcaggctgaaagacggggcgcacatgcccccggaagccggggaggtgctggagttcgatatggaaggggtgtggagggagatggaaagccctctaaaagacgggctcat

SEQ ID NO: 7261 - DNA, 758 bp, Zea mays
aaatggttttagagttctggatcaaaacgcatttcggcattgatgctgtggtgactggtgacgccacatcttattccgagataaactagtgacaaaatgttgatgtccatccttttgatgaatcataagtttactactattgcgctttgggtggtttatatattaccgtctaccgagctacgtttttttttctttcttttttgtacaagatcgaagctggtatgcaagattacaggggatacaattaacaagttggaggatcacatatggaagcacatcaacgggaagagatttcttaacaagctaggtaaacgttatctgttaatgccagacgaattgcttgagaacaattcattattatgaaacgcagattccagtagaacttgcctggaattatgctaccaatacaaccagctgcataaaacctgcactagaatgtttgtacacatgtaaccatttaatgtgcccatccccgtgtaacagaaagggtagaagaccggatggcttctggtgagatgcctgatggagaacctgtgaagtcaaatgaagtggcaaagaagagcaagtcaagcaagaaggacaagaagaaagctaatgttgccagcacttctttgccaagagaacctaaaccagagatggctgattcagatgatccagatttctgggtgcctcctgttggaagtcgctgggatgacgatgacgggaaagacagatgggagtcattaccaggaaagcccaacttagcaaagaacgaaggt

SEQ ID NO: 7262 - DNA, 1113 bp, Zea mays
cagcttgcatgcctgcagaggagaactagttgagctcaagattgaatgcactgaattttctgatacggaaaacattgcaaaggctgtatcagaatattctgtaccgattattccgagcatagatgttctaaatcattctgtcgcttcggatactaaagatgtggatcttattccagagagtcaggatcagaaggacaaacacctcccttcaaatgcagcactttgtgagagtgaggcacctgtagcagatgaggacgcagagcttgatgaaactcagtctagagctgctctccccacaccgcaacatgctgaagctgatcatacggaagcagctgtggatgagaataaacatacaggagcagggaaggttactgctactgcaacggacgacgatgcagtagaaaagagtcatggagacccaagaacctcagagacctgcaatcctgctggacctacagacaaagcggagaaacctggaaggtactctgaacaaggcgctgatgatgtgactgaagatcgtccagaaaaagaagcccaagctgttgggaccagcgacactggtttcgtgtttgaacctggttctgtgcttgtggagtttttgcgggaggaggctgcttgcatggccgcacattccttacatgggcgtcgcttcgggaacagaactgtgcatgctggatatgctccgtatgatctctacttgcagaaataccccaggtgattctgcgtttgcgactgcatgaactgcgatacgagctttgcctatgtgccagtatttcacagaaacttcagacttgtagttttggcttttgagcctttggatggttcttccggtccagatagtggtaccattagttgaacgaaatatttggaaatgttgttccacagtagatatcggatggacaataggatataagtactggatagagacacaagttgtcgttaacatcgttctttacttcgctattaatgtttttgatgacgtcagacattagtgtggatggatggatggatggaatggatttattgcaagattttggctgctataatctcatttttttactatctgctcacttgtgctctgatgtttctgaatgtgtttttttctctctcgaa

SEQ ID NO: 7263 - DNA, 811 bp, Zea mays
atgctggcaaaggaacatcaaaggcggttgtagcccagcagcaaaggcaggaaactgaggttgacaattctgatattggtggtaataagcatgatttaacagatgatacagaggaactattttggggttcacctatcagagtgcaaaatgagattttaccctccaaaagttttccagaggaacatgacgctgacaaagctgaatcgcagtttagttctctatcatctgatcctcatagcatggcaagccagcgtgcatggaaacaacctactcaaggtctcaggcctaagtcactgctagaaatccaagctgaggaacaactgcgtgcacagaaaggattaactactgaaactgctaagccagcagcttcagttccttcaatttcttggagtggcatgtcaatatcttccgagcaacattatgggggttcaaatatatcattgggaagtatggaaagtgctgttgagagaaataaaagaagccagttgcatgatttgctggcagaagaagttctggcgaggtcaagcattgcagataatgagaataatgccaatgatgcatttttctctcctctgtcgcctgctgctgttcaggctgatgctcctgcccttgatgataatgacttcattgaggccaaggacaaaaagaacaaaaagaggtcagcaaaaacaaaagcttctactgtgaaggctccatcacctgttgtttcctttgatccaccagctatttcgatgccttctgaaaagggaaagtctgccaagcaagtacaacaggagttagaaatattgccagctccaccaagtggtccatt

SEQ ID NO: 7264 - DNA, 756 bp, Zea mays
agctagacagcaagggtctggccatactgtccttgagccatgcgctgttgcacctgaaagaagatcatctggagcagggaatattgctcgaattcctcatcccaccagcagcggggaaaaactttcggataaaagtagctcctcaccaagaagcatggcaaagaaggtctggtagtcatctgtaccctcctttgaactgtaccctttaggcctcatgtacttctctttgtttctcagacagtcttctatttgccttacgctgccaaattaacttttggacatgaaactaggcaattttaatgacaaattttgtactgtgtggatttgcagagtccatcattcacacccaggaagcctctccaatctgacaacacttctcacagtcaagatgatgactcatattctgtcacttcttcgtatccttttttcttttcaaacatggatcacattgaattctcatgtgaatcttattgttctgtctgtttagtgtctcctttttatttagttttttatgcatatgaactccataaaattttggatggccacttttttatacctttataactgacttagtaaaaaagtttgcttcatttgtattccccaatttcctgagctgcgtacagaactgtaacttcagcaagagctgggaaaactaagaagacaactgttgctgttgcaccaacattcgtctgtgctaatcgtgctgagaagagaggagaggtacacatgtaatttcgtggtgcaaaatcatgattg

SEQ ID NO: 7265 - DNA, 811 bp, Zea mays
aaggatgacatcagaagatcagcgctgctattagcgaagacagtattgcccacaggtcacaagaaggtacaacctcttgagtttgccaaggcccctgcttcctataaccaagcagctcaacggggtgtcatggataacttgacagagcttctcacgcagatctccccacaggactttcacaaccaccataatctgtttgtcaaaagaaattcaaaaacctaaaagaaaaaaaagcaacactgagaagaaggaaatggcagataacacgaccagaggcttggtgtgctcacttccttctgggtagctgtagtgttcaggaggtccaaggtttccatgtcgggttttgctccatatttcttcgcgataatagggtcagagaactccgagaggggaatcaacgctattatatttaacacagaaaaaaaggacatagatgttcatgatgttaaatcatgttaggatgaaagtaacaccaacattgaaaatatcttgccctacaatgctatttaatagtgaaaacatgaatagcaagctgagccatatggataactggaattgatcctcaaagcggcaggacacgatgaatgaaacagataagaaaatctgaatttcattttatgtatccaaaatatatactatgtctgtgtatggctaactccagtagcataggcattcggatgtggctgcgtgcgagcaccccaaaaatgtaacccgtccagcagtgcgcgtgccccatcaccatataggagagaaaaacatgcagattggcgcgatcaaacgaccgagcaccccatttgggccgtcccaatcc

SEQ ID NO: 7266 - DNA, 793 bp, Zea mays
tgcacagggagacgcgcaggccgaccagtcgttgaccaacgacgacagtcagctccaggacgcaggcgcggggaagtacaccttccctcccggttggtgcgacgtttcgagcatcccggcaacgggctggggcgactgatcagacccgcaaccgcaaccgcccctggcaggggggtacgttgggagaataactgaggctgatggccctttcaccctccttccatcaagcctccactcagctcactgctgaacagttgttgtagcgagtgagctgcgtccgtgtgtttaggccacgtgtgccaggtgctggcaacgtgcaatatggtgggttagctcgcgtgccattgagcgtgtgctaatggtttttaaatgcttaggcctttttcggttacaagggataaaattctaccatggatttaatccgaccagaattaagtaaattcatacctcacatccaatcacatggtgggattaaatccattaattaatccatgtatatctcaaagatagttattcttttaatccatggattttaatataaacttgtgcaatattgtcatggatttatttcatacctaatgagctatggatagaattcatgtcttctatagtttaaaaaattctcaaacctttgagttataattttgatgggtttaaccgaataaaaaaccgaatagacttggattattttgtagcatgaattgtgatatggatttaattccaatccataataatcaaggagaattgtgatatggatttaattccaatccatattaatctaaggactgggatg

SEQ ID NO: 7267 - DNA, 769 bp, Zea mays
tgcatgcctgcagcgcccagtagtggaagctgatgtatgacatggggtacctccagaagggcttggggatgtcgtgcggaagcctgaagtaacccgacaccagcatgaagatcccctgtgtgtgtccacgacgaccattacgaaacgatgagcctcggtctcagtctcagactctcagtctctcagtctcagtttaattacctggatccctgcgccgattatgatgcccatgaggaagttggggatgacgctggcgatggccatcatgaggctctcgacgacggtgacgctggcgtagagcgccagcacgaagaagaggtagtgcgtgaagcccgggtgcaggcgcaccatgaagtagcacagcgtgcccgacacgaaggtgatgaggaccaggaacggcatcgccgagaccgtgttgctgacgacgaacgccagcacgccgtagtgcccgttcagcctctccctctggaacacctggagaattataaagaaacgggaattgaattaataagctgagcctgaggccctgagcataggaaaccctccgatgacagagacagaccttcatgtcctccacgaaagacggaaaccctccgatggacatgaacgtgacgaagccgaagatgaacgaagcacacgcgccccgggcctagtagtatagtagttttcatcagtcagattcagaacaagcaagtagacgcattattattcattcagtgcccaattaacccaacaaaagacgacgatagatgttgcgtgttaataatta

SEQ ID NO: 7268 - DNA, 857 bp, Zea mays
acgacttctcctctcaattgcctgcaactagcagttagtacatcagcaaatttccagggaaacactatacacatctaacatctaagaatataccttctgccaataattaaaagtaacagacaaagtaagcacattataggtcaataacaacaaataaaaacgaacggagggagtatcagctatcagtagtttcaacgcttccaatatcaacaaatataactcctgtagtctgtaaccgtgtatataagtaacaacataaaaatgtttctgtaatataagttatgaagacgattaaaatcattaaaaacaccaaatgacattcttgcaaatatcctaaatagattggtcatataaagcttaaaactaaagatgaagtcgaaaccctatactatgaatctttataggaatctcatttttagtaggctactttgaaatgaatggacatttcagaacaaccaagaagacatgccgttgcaaataagatcctcaacaactgacttaagtttacggatcatggcaaattgtcaatgaatttctaaacacaatcctgtatataacttcttaacatgacagcctaaagtgtgtgactttttagttgcagtgcgtagtttctacaaacaagtacagtaattcagtcacgacacaaaggaacatctattatgatcggttaaatattcaaagagaataaagagaataaggggaaatggggtaacattaagtacaatggagaagaataaatttagatttaacatgccttattgactactgacctttctgcaaatttaagcacatttaaatggtcaggcacctaaaactgaatagtgaacacagctagatgccagtaagaaagaataaaa

SEQ ID NO: 7269 - DNA, 787 bp, Zea mays
tgccagatcggttgggcgcgctgggtttggtgggcatcgtcgcacgcatcgcatcgatcgatgatcatcccgtgccacgccacaccacaccacctgtcatgcacacatctgtacagtacgacgcgtactactagtgcctgctgcgacttctgatttgatgagttcacgggaccgggccccaacgtcacgtgatgagaaggggaaaaggatggagccttttgccagtttccactacccatgcggccatgtctggcctgcgactgcgagtgcggcgtagagtgtagtccaacgttgacatgcggagcggactagactagcggagggaggaggccgccggtccatgcgtttgcatatatgcagccgcgcgcgcacctttccaaagacaaaagcgaaacctacgctgatgatggcgatcgattcgcaatgcaaatatgcaatgcatgctcccatctatctataggccagttcagtgaaaaggaggagggagtggtggtcatgcacagcagtactccactgtgctactactacaacgctagctagctgcgcgcgcttcgggatcacacgattcacatttcacgacgtgggcgggtggtttttttttatctcagcgctattatttgcgagtatatacgtggcaggacacgcatgcaagggcgcgatcgagtgcgtggtatgctgcgcgcatgcatgcgtatgcgcaccattcgctgtcaggaacaaaaaaaaaaaaaactgactcaaaccctaaaatccggacgggcagatatcggatgccaatatatgccac

SEQ ID NO: 7270 - DNA, 876 bp, Zea mays
aggacatgcaagcagtccacaagcttagaacaagcgagccttcaacgagaggagcactacaagaacactcagagaagtaaactgacctctgcccacatgcataacaccgtagaaagaactccagtgtacaatgctggtatccaaggaaacgaaactgtggtatcccagagcatcccgaacgtccaagattcaaagctggatccgctggtatcaacgtagccatctttgaacataaaccagagaacggaggagaaagcaaccacaaggacctggatgatagaagattttgtgaaattgtgtccacggcgttgcgccgtcgcaatgggtaagatatatagcagtataaagggatacgagaatatgttcgcgcaacctcgaagccaagaagagctaaaaatttcttcttgtccgtactccttgatatttgttctgttctaagcatatggatcccgaaaaacacggcactgaagaagttcaaaatatcgccaacctttgaacacaatgaaagcagttcaaggaatcagtatcgtatttactttttaaggcacaaagcaagcagttcataaatatatccaaagacttggaataatgaaatctatcgattttgaggatttaacagaagttttatatgtttgaaattcggttgatcatcgtcaatgcaagattgaagactcaatgggagtgtgactattgttgcatgcataaagaaccttttggacagaagtcaggaaagcaagaaactgtgccagagatctttaacccattctgtaagatcctgaaagctattattcactacagcccataaactacttagtaaaaacaaaagtgttacttacacttgggagagatccaccacattccaagaggccaatttcc

SEQ ID NO: 7271 - DNA, 895 bp, Zea mays
agcttgcatgcctgcagctcagccacaccaatccactccactcctcgctgtcactgaaggtcagttcagcttcagcacttcagctcaccatcacccgctgccttctccgaactctttcttccttctacgttactcttgtccttcggatcttgtcgccgtgtgggctgcggtgagcacgctctccgtcttcctttgtttggtggttgtgaaaaggatggggggaaatctagtacctgacggagagcttaggttgataaggggggtttagatggtgatgtttttggctcaattgcttcattgcacttacgcatgcatgccaaagtctcccttgtcatactgctgctgcttggcactttgaaccttacgttcttcttttgggcgaccttgtgttgtacggttgttcttttcctgctacgaagctgagtgctcttttgtggatatgctgcccactgtccagcgtgtagatttttccccccatttcggttttcctgtgtctcttcccttttcccctattctccaactccttgcctgtagtagtgtagtgtggttctttgccaggaactttaccgcagtcaatttggaggaagaagtgcagtggagatagtgccatgttggccccaactgtcaatcaacttgactgccgtgttcgcactatacctacttcattagcttttttaatatttgtgttaggttgttgggaaagtgtacttgcgtaaggtgcaatccttactgcgttacagctgcaattccttgtataactaattaaatccacacttcaggatatgcagtctcctcaagatatacgatctctatgactgaatgtgcagagaccacttcataggtgaagctttttcgatatggatcttggtgaggttatcttgctaactagtatccc

SEQ ID NO: 7272 - DNA, 864 bp, Zea mays
acctcatatctatgtgaagagttagatctttcggctgactctagctttactgcaaggtccttgaactttgactctattattcccttggactcaactagctctgtgatgatgttctctttcactgacagaattttagaaagtttgacattctcagcatctaaactagcaattatgtttattttatccactacattttcttccagcttctgaactttgtgttgttcacaagaaatcatttgagctgtctcccttatgagtgagtccctctctaccattgcaacatttagagcctcatcaagctgacaaatcctctgctgcattgccattttttcatctaatgtatcatcaagttgtgtcttgatagctagtgcctcggcctcagctttttcccagcctagtatccatattagcaatacaaacactgttaaaaaaaagaatttccagcgtatatgccattttacttttagggcggtggacataggtaaaaactactcccttcgttccaatttataatttgtttgaattttttacctcaagtttgattggctcgttttattcaattttttttcataataataattatattttttcctttgatatcgtttgcatataatatactttaagtatgactttaaatttttcatgtttcacaaaaaaatgaataagacaagccggtcaaacttgataaaaaaaagtcaaacgaattataaattgggataggtggagtagttatgatcccggaatatgtgacaaccataatacttgacatattgagcccagtgtccctaatatgggcttttccagctacctttggactggttaagcttaaaatgggcatccctttttcaacgcacttgggaaatg

SEQ ID NO: 7273 - DNA, 800 bp, Zea mays
gcttgcttgcatgcctgcagccaatttgtcgtcgtggcagcatcgcgcgagggtggtggagacaggagacgtcgcgtcaccgacggcagcacgctcaggcgaatgaatgcccatccgccgcggtgctgccatttcccctggtcgagcgatccattccatcgtcgggcggcagcacccggccggccacgcccatcgtccgtggattggacgtgtacgttgatgtgccatgcatgccaaacagtcctcctcctcgcgatgtgagggacttccgaagcaagcgtcggttggcggttgccctgactgacgccgcgtccggctcatgcatggcaaggcagtacaagaagaagaacagctgcaccgtcatccgggcagagaaagggagcagtcgtcgtactgaaaaaggcgagcgatgagaagaggtcgtcaagaggagagccagcatgtatgcagcaccaactcaaggacgactgagaccggcaacattattattagcaactcgtaataaaattaaacacaaagctagaccagcaggcgctatgtacagtatcgaagatgcgtgtatcgcatatgaatatgaatatatgtgtcgataattaagctagagaaggtcagatgcgcgtaagagctcttgatatatatatagtagaagccagaggcaagtaaaagatcatagagtaacaatgaaaattgcaatgtgacgagatcatagagttaaccccgatagctatatatagctaatcttgcctggtttgtcgcttgctgcgctgcgcttacctggacaaattaaagacgtctggtcc

SEQ ID NO: 7274 - DNA, 766 bp, Zea mays
tccaaacccgagctgatgcctgatggtcatcgtacgtgtccatgcatgagtccgtctcacgtcttcaatggttgtgaagaaagcggcaaccgcttagaagctacagtgagggcgtactaatcctgggctcccacgtgtcttaattaggctcctatatcaggttttaactggagcaagcactgggatgggacgacgcaaccgacaaaaaaaatatgggtccgcttgcgcttgggctgggactgggacagggacacagtcacatgcacggccttccaagcgcacgcaggcccgaggaactttagaggacaagaccctgaacctgaccccatgaggccatgagccaggatgatgacatggacatggacatggacgagcagtttggtccaggcctccaggggaaatttaaggctgacatgtacaggcaaggcattcgcgttcgtgttcgatcgtatgcatggaaagggaggccggaagcggaagcgaaacggcgtggacggggcagacgctggctgacgtacggctggtctggtctggtctgatctgatcggtcagctgcaagcattcatcgggacgcctgtgccacacgcgtgcgtgcaatgcaatgcaatggacgcacacgcactgccctgcgtcgccgctcctgcgcttcgtcgcgcgtgcacatgcgcaaggcgctgtcggcaggtcaaaaaatggccggccgaccgggcagctggggaaagaggagagagagagagagagaccaggagctgctgggctgaggaga

SEQ ID NO: 7275 - DNA, 805 bp, Zea mays
cttgcatgcctgcgggtgttgaacatgtcagtaatcagatagtccctccgaattctttgttctttttttttcttatgcctgattgcattgcagtttgggctctttggaatttttgatggacatggtggggatggagctgccaaagctgtcagcaagttagtcatttgtgcttctttgatgcatgactatgcatggcattagtttattctagtatatggggattttcttgtatttatttttaatattttgatagtttaatctgaccatgcaaagctgatgttttccctttcaatttgtaggattcttccagaaaatctgggatacattttatctcatcctgaaacaaaagaacgagtgcagtcatgttctgatgcttctgatgttcttagatatgcttttactttgacagaagatgcaatcgatcatcagtacgaggttcaccctttctctagttgtcatgtgtcagatgccattggtgaagttttagttcagacttcagacttatgttcctattaccttactgaattttatattttgtgaaaagcttgtttatatgtttgcaacttgcaaggctgtgatatttagtattttagagctggctctcttgacttaatctatgttatatattccatgtttgatatatcaggctcatcaagaaatcctactgctgtagtgatgtcaacaattaattttctgttggggtcacaattcatgagacagtttatctaattgctgatcccatctcttgagtacacattattaggttgtttttgtcctaatcgaaatggttttcttggtttccaac

SEQ ID NO: 7276 - DNA, 836 bp, Zea mays
tccctcgcggcaaccgttccggtccaggcggttctgttcgacatcgacgggaccctgtgcgactcggatcccctccaccacgtcgctttccaagagatgcttctcgaggtacggtggaacgtcgcttttccctgtttcacttttctttttttaaaaccaacgagctgcctgcgatgtgatgtggtttgatttacgaaaccaaaatggctggcatggcatacgcagatcgggtacaacaatggcgtgccgatagacgaggagttcttcatcaagaacatcgctgggaggagtgacgtcgaagctgcccagaacctgttcccggactgggagcttgagaaggggctcaaattcctagaggacaaggaagccaaatacaggaggtacgtacaaatgatagctgtggttttcctcagtattagatcaactgaaagattcagagagtaagcgtgttgtccattgttacaagtttacaacagtaaacccctttgcgtaccgtagcacatacataaataacatccatttcagcgctatcacgcaaaaaaaaaacaccaactttttgctactcagagagatcgattactaggttgtggagagttctgtcatttcctacagcgcccattcgctgctgattctgcggaatgtgatcctttcataatcattacaatacattgcattgcattgcattacagaactgataggttcgttatgacaacgtgcatgagtgactgaatgtttctagttgttggttctttttattcagtctggcaaaagagcgcttggtgcctgtgaaaggcctcgcgaaggtggtccagtgggtgaaagaccacgggtacaag

SEQ ID NO: 7277 - DNA, 816 bp, Zea mays
agcttgcatgcctgcagggaaggagctactggaccaaattcaaatcagcatgtgtgcaacgaatgggcgcgatactgctcttcgttatattagtcctcaaccctgaagcttacccaaacagatccaaaattatcacagcagtatttaggtcactgggctctggttttaggaagagagccacatcgtctgcatagagcaagatccggtgttgagaggaattagaagaaatgggccacagcaacccatgctcctcagccttgacaaaaaagcacattgaggacatccataataagtataaaaagtagcggagacaaggggtcgccttgccgcaagccccttctatgagaaatgaacctcccaggcaccccattgagtaggatctgggtggaagaggtcataagaataccacttatcacatccctccacacgggaccaaagcccaatttctccagaacttcaagaaggaaaggccaagaggccgagtcgaaggccttcgaaatgtctagcttcaagagaattctgggctgatttttagcatgtagaaatcttgccatctgctggacaagcataaaattgtcttgtatgaagcgacctttgatgaaggcgctttgagctttagagaccagcccctccatgtggcacctcacctatttgcaagaaccttagtaaccaacttggcgaaattgtggatcaaactaatgggtctgaaatccttggcagctatagcatcattatgttttggcagcaacgtaatgaagtctgtgttaaagaaatcttgaaattcctgaagtctctcccccaaactggtgaaacaac

SEQ ID NO: 7278 - DNA, 779 bp, Zea mays
cataccctcagggcagcacgcatcttgatgtgtcttgcttttgaagtcatacgaccccagaaaatgctgaaatccgaaagcaaacagcattatacaagcaagaacaatgtgttgcagcaggcactttcgcgaaattgaatgacagataaaagctagcagcatataagcatctattgtcatcaaggtcaagcactggacactgtttcatcatgatgcagcactaagtacaagaggaggggaaaaaaagagtaaatgctgccttcattggcaccacatgtgttcatcgagataccagacccttctagaaaaagataatcattgacctcatgggtcttacactatgtaaacatcctgcatgctacagccacaaaagtgttataggagcaacaagcaggaacaaatgacaatctcgattgtgctatccaacattcagattagaacgtcagttacaaccttaagattggccaaaagagttcccacttgtggcagatgaaggacatgcctgactaagcaacaaacaataaatccagtcgaagtaactagttcaacatcagcgtcatgaaccaccgagaacactacacaatgtgcatatcatgtttcttccactaagaatgtatgcctggctctagataagctttaattgatagatcttacagaagtgcactccagcaaaatataatttctttaccaccagcaaacgttgttagttgtacaggttgcgcatcattaaacatttcgactacaggatattaatcagtatgtctcatagaacttttgag

SEQ ID NO: 7279 - DNA, 800 bp, Zea mays
aacacaaccagtcacaaaaataaaccacacactctattcgctgcaaaccaacataaatcttgatgcttaccttctgtgaaattgcacaccacatttcggcagctgttgaaaccgtctgtcatcatgcgcgctctcctcctcaaagattcgaggatggacttgctgcaacatcataatcataatcatttggggccacatcaaacttacaaatgtaccaaaaaaaattaagtgttcaatatctcgcatatgttcgtttttctactgaagctggacacggactaaaacctctgaggggcagtatgtttaacctttcggcagtgaacttcgggtatgagatatctccaggtttaggagggttaaccatcactcccatctgtaaaaggcagacttaagcaactacgctatgtagtttggtaaagcaaagaaacaaagctttaagaacaattggtgtaggtggtccaaacatatgttgttccaaaacagagtaccgggttcagtggaagagcaaaagaataaaacattaagccgtgtttcacttacaaagatttgcccgggaacattcggactcagtactattgatgcaaccttgtatatctcatctactgtctgcaagctcaaattgaaagaatggctaccatcagaccttaaaaaattatattcaggtatccagaaaatgacattcaaagtgtcacaatagaatctagcataagccttatttaagtgcctagcttgtttaaaggggaaatcttaactggcaaagtttaaaggttttttagagcgttttaccactactctacagt

SEQ ID NO: 7280 - DNA, 706 bp, Zea mays
agcttgcatgcctgcagcattgtattatctgtctaaaaaagaatgcaattctaggtgcattcttggttatagtgtctaaggtttgactaaatatatagttaaaaatattaatgtttgtgacaccaaacaagtatactgtgaaaatatatcttatgacaaatccaatgatacttatttgatatattgcgaaagggcctctagctggattggttaggtggtctgagttttaggctggggcctctacccgtgggagcgaattttaggttggggctaaaaaataccccttgtccatcccacaccaaagcacaagtctaaggtccggccctggtcgtggtcgttctcacacaggctacgatgccgctgtgcatgggtggggcaggggtttgggggttttctcgacttgtgtgagaggtcttctcttaacacaatatctggaggctgtcttaccctccgcaggttgagttttttatttgatatcttaaattttgatactttttttacatataattagttaaactcaagatactttaatttggtactgtgctagaatcacattcttttctggatggagggagtacatagttacttttccccatgcatcttgtgattcttctaaatgcatctccatatattatacaaaataggttgatgataagctttacatatacctggagtatgtttctggtggatctatacataagcttca

SEQ ID NO: 7281 - DNA, 781 bp, Zea mays
aagtggaagaccaagacctacgcgctctcggtgcccctccgggtcgtggcgctccgcggctccttccctccatcttggattaaggtctggtcgccttcatccaccataaacaaagcatgattgcataaatttgtgtgagcatggaagatgtatggccagggtcgctgttccctggaattctttaaaagaaaaatgaatggtgggtggtgtgcaatttagtgagaatttttttttgtgtgtgtaggatttcgtcgaagctcaggggaagagactcaaattcagtcctgagctccgtgctaatcttgatgggatcttctctgagatgtcacaatgtatggacaagggtcaagttcagccgaagtctgcaatggcagctgatgttgtttcccttggggactcttggctcggctatgccatccgcaagggattgctagagcctatcaagaatgctgaagaacaggattggtttcatagcctgagtgacagatggaaggtgagaagtggaacctttacttttccttgacaatgcttatcatttgtatactttggaacaagtttgtgatcttgcattgcttggtaaataatttacttgttgaattttattagatcatataagcttgtaagaaacagtctatcatgagaaatccatgacctgtataggtttctattctactggatctcgcgtattattaatattcaatgttccatcagttctgcttataagtcattctaaaattgttctcaagaaattagaatcttcgatcattgccctgacatttag

SEQ ID NO: 7282 - DNA, 765 bp, Zea mays
ttgcctaaaaaattattgtatgtgctataaccattgctttgttatgtgaaactgaaaatgataggaagaagagagcaggagagatgagaagctcaaatacagttgcaagtgttctttcctggagatatataatgaacaaattacagatcttcttgatccttctgccacaaatctcccagtaaggtttcatgttgtagcttcgagttgacatgaccttttcaatgtggcaccacgatatgtactatttttttatgtgcagctccgagaagatataaggaatggagtgtacgtcgaaaatttgactgaattcgaagttggctgtgccagtgacataataaaactcctgatgcaggtatgtttgccttttgatctttttcttgtgaatatctggtaaactgtccatattatttaaaattttgcacttggccaaaacctgctccagggttctgcaaatagaagagtggctgctacaaatatgaaccgtgagagtagccgctcccacagtgttttcacctgtatcattgagagtaggtgggaaaaggattcagcatccaacttacggtttgcaagattaaatctggttgatcttgctgggtctgaaaggtaggagacttttctgtcaattgtgtcccagtatattgtgctgagttcaatcatgattcttgataatccacttgaaacaggcagagaacatctggagcaaaaagtgagcggctgaaggaagctgttaatattaaccaaatcgttatcaacacttgggtttgt

SEQ ID NO: 7283 - DNA, 742 bp, Zea mays
agcagcagcccggcgccggcgttggcggcgtcgaggcggaggacgcgcggtcctgctgcttcgagacctccccgccgggccccgtcgccgacgactgcgacgccgcgtcccggggctcctcgccgccgtcgtgcaagtcctgcggaggcggcgacgcgtccgtgctgctgctcccgtgccgccacctctgcctgtgccgcgcgtgcgaggccgccgccgaggcgtgccccgtctgcggcgctagcaagaacgcctcgctccaggtcctgctgtgacgaggcgggaggggccctgccggcgtgttggtcccgcgcggtggcggcactcgttgtccaatgagatccgctggctcccggggtcaggcggcgagctttgttgagtagtacatgtagagatgctccaagttgcagcatagtaggctaattttagacgcagttagctgtactactggtaattggcactaacttctgttctcccctcgaatatctttctggtaccttgtttctcagatgtgctagtagtatttttttttggggtagtgttggcttgttgtattaatgaggagatcggctaaagcttagatacgaaaagctatggtattctactatacttggagcttccctcgacatgtattattgtttcagcgtgacgccaaatctgcttgtagttgtactgaagcatcatgttaccaacgtggagtggcgatctggcactgttcacatcgtccacggccaggatggaa

SEQ ID NO: 7284 - DNA, 836 bp, Zea mays
ttggcaaaatagtatttagaattttaggtagctttacaggtgcacttctacacatggcgatatttcaatttgctgatccaatgcattaacattggtaacaagaatgttgtgcactgttacgattttactaacataacatgatttgggatcaaagactgaactgatgtgctttgtgaatgatgactttggttaaatgtgctaataaagcactctggatgtcatgtcaactcttaccattccattcaagctttcatggagattgtgctcaattcagtccacaaaggaacaccgggggatttatctgttgccacactgaataatttaactttgctgcaaattatattgtacttatggtggtatatgggaaatgcacatttctgttacctttattttgttcaggtatatgacatttaatattcattcttaggttgtatctgtcattgaaagacgtgcagaacaattggattatgtactggtggacactcctggtcagattgagatcttcacttggtcagcttcaggagctatcattacggaagcttttgcatcgacgtttccaacagttgtagcatatgttgttgacactccgagatcaacaaaccctgttacttttatgagcaacatgctttatgcctgtagtattctctacaaaacccgccttcctctagtcctgacattcaacaaggttgatgttgccaagcatgagtttgccattgaagtatgtatacccattatgacagtattgttttctttgttgttggtgacttggttctatcacattttcatctgccatacattcacgtgttatcgaaggtacaatttgcatgtcatgcaat

SEQ ID NO: 7285 - DNA, 790 bp, Zea mays
accaggagcaagttaggactctagaggtgatattcctagtactgtcttcactcttcaactacgcttttttttttttcctgtgtgatataacaactgaaggagcgtttgggtatgtgtgtgtgaccatacgtttgcagatgaacaactacgccctcacaatgcatctcaagcaggctcaacagaacagctccatacctgggcgtttcaaccctgatgttttctaagcgtagtagctgctgaacggtccgccccagattaataagctatgtatgaatatatcttgttctaccaactgctcctgagatggggatatccgataggtggattcaccgcccaagggtccagaattttcaagtcactatgtttttgatttcgatatactccgtatttatttaaacgtgttgctttcatgcaattggctatcggatatactgtgtgcgcccacttttccgggtatggtttatttgatccatggctacaatcaatattcgtcaacgtaatgtaggaactaatattactgtatcccgttgtagttacaatattgttttataaaatgaaaagtttcggtccctacgatatagtatcgcagtactacctcagttcacaaataaatgacgttattgatttttttttgaaaaaactttgatcactcgtattattcaaaatatttatttaaaaatataaaattttaattcaaacacaaattatcttaagtgataaaataaataaataaataataacttattattttttaataaaatgagtggtcaaaagttttaaaaatagttaa

SEQ ID NO: 7286 - DNA, 864 bp, Zea mays
agcttgcatgcctgcaggtgtggaaatgaaccgacttcatccttcgtttcatgtggtgtaaaataattattcattttctctctctctctctctctctgaaggattttaccggtgtcccagctatcgttgatcttgcaagcatgcgtgatgctatggcccgactgggtgatgatcctggaaagattgatcccctggtaggcagcactcagtacagtgagacacattagaatcatcatgtaaggatagtcatgccactgatcatcttctaatatttctcaacttctcgcctttttgctattcgcttgcaaattccagtggatctagtcattgatcattcggtacaagctgatgtagtaagatcagagaatgccctccaagctaatatgcagcgcgaattcgataggaacaaggagcgtttcgctttccttcggtggggctctgtggcattcaataatatgcttattgttccaccaggttcaggaattgttcatcaggtgcagtttgtttttttctaggccgaacagttcacattcctaaatttttgtacaccttaatttgcattatgcttcttgagtttcattttatgctttttaacccttttttttcaggtgaatcttgaatatcttggacgagttgttttcaataccaatggcattttatatcttgatagcgtgctgggaacagattctcacactactatgattgatggaatgggggttgcaggctggggtgttgggggaattgaagcagaaagccacaatggcttgggcaggtaataaaacagatatcttcattctttgtacaaatgaacatattctatttgcatgtgaaccctttatttttgatttttttttgatgccaata

SEQ ID NO: 7287 - DNA, 845 bp, Zea mays
tttgcatgcctgcagtagcaaatttttaaggctaatctaagaaaaataggcacaatcggaagtgtacattgttatgtagaccaaaaaagcgtttcgagaaaaaaaatttagaccaaaaaaggctggccaattgatagacttgcattaggcaattttctgaacatgttatgatattctgccccaccaaaatatggagttctattttctatgttgtgaaatgatcttgttcctgttgtgtatttgtaggtgctatgtgtcttgctatattactatattagtactatctttgttccacaaagagttacattttggttttatcctgagtcaaactatcttatgtttgaccaagtttatacaaatgatcaacatttatggcaccaaatagatttactatgaaaatatatttcgtgacgaatctaatgatatttatttcattatttgtatcataaatattgtttttttggtataagatcaatcaaactcttaagatttttttaacttataacaaaatcagaattacactttttgtaggacagaggtagttgctgcctttttagctatatggtgaagttgttagagagagacatgttttggggcatattttctattttattaagccacaccataaaccattgtaggattgggtacatatagaattagcaaaattggaatcgaagaaagcttcagtatattctaactactaaagtagatgctaatcaagataagatagatgataaggtgttgggatatgaccaactactagactagaagctgaaatctaaaataagcacaaggccttattatatcattcttcctcctgtgtaatgacttctgaagaaattgaa

SEQ ID NO: 7288 - DNA, 779 bp, Zea mays
ttttcctgaaaaaattatgtggctagccgtcctgactggtatttgaaaccctgctaaaattgttgatgtttgggaaactatggcattgctttctcaccgtagaatctcactattcacaagcagtaaccttgaagacaacgtttttttttgtgtgacaccaatagtgctaatgtgtgagatttatcacaggaccaaacacctttctaaactataaagcacgacacttgcttttctctatttcttataatctcaaagaaattaccagtatttctcatatatttggcctacaagcttaaatttggcatgtgtttgtttggtgctatctattctggtgcttggtaatattgtttcccacatttcatatatgtaagttttaatagaatgaatttttcttgttatatatggcttgattgacttggatatggtaatgcttaaattttgatagtgtttcaccgagtcatttttgttttcaatcatctgaatcctttaagctaaaacggtttcagttattttgccctgctactcattttcttgtatctttctttggatgtgttgtctattaatttaacccacgactcatttgctgcacttctcacgtttcagcttacgacaccatcgacaccgagttaactgttcatgaatttccgaaggcttgttttatcccccgtctggggcgagttttgttagtctgtaacacactgggaaactctcctaacttaattgcaatcccttgtggctcctccaacttgactggagctgggacatttggctgacaggcc

SEQ ID NO: 7289 - DNA, 745 bp, Zea mays
tgaggatcgcatcgcagcggcagagaccgcagcggcgcacacgatcgagatggcccaccagaccgctgctgcggccatgcgcatgaacgcgggtgagcgagagcatgatgccatggccgagcgagacatgggcacgtggagccctcacaagcattggcacgtctctccttcccccgagtgctgccatggctgggacacaaaggcgcaaagagtcctcacaggcaccaacacatgtctctttccccggagcgacgtcgtggccaccatggtcgatgcggctcctccatagttttttcttgaaaacgcgcaagagaactgtgccccttttttatatattaagaagatagagtaaaaggtctaaagtagaccatacatcagaaggcctccttacgggggccagtagatagcatacaaaaaacattcatcataaaaaaaacaacgaaccaccctagggagaacataggctcttcgccccagctgtttcccaacgacttctctcctcatctgccaaagcaaagaagaagataaaggctcctccatcatcaaaccatcaccaaggagtctggcagtagcacatggcccatgccccgtgctcaccaaaaccaactacaacgagtggttcttggtgatgaaagtgaagttgcagggccgagaggtgcaggatgtggtctcgtacgacgacaatgacttcgacgagaactagcagaccagaggccctccttgccattgtcccactggagatggt

SEQ ID NO: 7290 - DNA, 743 bp, Zea mays
tgctctacgggatattggccaacaaatacgcgcataaagacacccgctattacagaggtgatgatccgtggccttacacaagtggcctgggaacgggtggacgtatgctttcataagagttggctaagatacaacgcccataataacatccaggtaagactaacagcctagccatctgcggacagttattttagtacagtcgcactttgcattcatacttttaaccatctggtgattcatgctacaacgagaccaccaatcaggagttcagttcaactgctaagtaatataacaacttaaatgctgtaaaaaaatgacaatctttctgttgggcagctgagaaagaattgtatacattgttattgctactactacctgatcagtagctgtgaaattttcccttgacgtatatgacacttccttgttagttagtaacagatggaacttccctgtatcgctacataatttaccttattgcagaaaggaatatagggttgtagtttcagggaagtctaagcacttcttttggttttactatggttgcaggttaggatccatccaattaattcagatggagaagacgtcatataccatatgatagacaattttgtagtgtagccaagtagtccgtccggtgaatgccaactactacgtaaaagattactgctatttccagtggattcgccttgagaggtcattaatcttttaccatgtggggtgctatgcacaacagctagataatt

SEQ ID NO: 7291 - DNA, 855 bp, Zea mays
tagcgtcaaataactgaataaacatatatactacatgtaacatgtgccctgaaatataaaggcttttgagtttgtcctatgcaactatacccgtctacttttagattttgttattatatccgtttctgaattcagattgattgtcaaaagttcttggaaatgctggaccaatactgttggtgtcctttctattgctcccagcgctttaagattttgttgtgttcatttctgattcatcgccagaagtttctgaaaaaggttagatggggtaaggggacgcggttattgtttagcttcgtttgagcatataatgcagggcacatcgagtctctactactattaagaacggaatgtgggtacctggtgctaccacaacttcaccccgcgctgacacactgggcccaccccacacgccccctgcctcggcgtcgtgccttgttggccccatgctcagcatgctctcagctactgccctatggaccccagcgtctgcacaaccaccaccagaccgcacgtaccttagtgtttagaagtaaacaataattatataaaaaaatagtgcaaaacgagcatttgaacacacaccccctactctagaaatttagggctaaccaacagactacacataccttagtgtttaaaaataaacaataattatatttgaataaatatctcaatacctatttatatgttatatttaggatccgtagcaaaagtacgggcaactggctagtaacataataatttataacaaactcgaggatccttctatacttggagttaatgatatgaattggttattttaagatcagatgactgacagtgtccatgtaaacaaaaaaatttttgagattc

SEQ ID NO: 7292 - DNA, 760 bp, Zea mays
cttgcatgcctgcagtttaggtgacccatacaacatataaccgttgtcctctaaacaaatggaggagcaaagcaaccaattcagaactcaagtcagtgggaagaggcagcaaaaagcggttgcactacttactgcaaacttcatccatatcaggagctagaaagatgaaagattcactgagaagtggaaaaccgcgaaatcctaagagacatgcgttagtgctcccctttgcctttccggctccacgaccactataagagtcatctgaggaaaaccagacaacatcatccgcaaccctgagcatgaaaatggtggcccataaactcagaaggaacgcactacaagccacacagataaacagttttcggagggcgtgacggttagtaaacagttgatagattcatttgacatcgaggaacctactttactggtaacattcggaaagtgccaccgactcccacaagtaaaaaaaattcacaccactcacatagctcctaactgttccatgattacacattctgcaaaacatgatcacccagccttttggggttttagaagatctggatggcgggttgctacttccagtggcgaagctagagtaaattaggggagggtgcatataccttgagggtgcataataacaatttataggtggtgcatatatggtgaaaatttgatccaaaccactagatttccaaattttcgcgggtgcatgtgcaccccctagtttctacatagcttcgcccctggctactttgtc

SEQ ID NO: 7293 - DNA, 817 bp, Zea mays
tgagtcaaattccatatcagactccaaagcatctagctctgcaacgtcaaatgaaacaaataataagaacagtaaagcgagaatcatctccaaaaattagacgataaatcactagctagatggcaaggaagaaaatttaggccatttatagagtataaatatatgtgaacaattggagttttagaccattagcaaataaccatattaccaagtgatgtgccaaaaactatggaagacttaaatccagaaatagatgtcatattgcaaagatgaaattgtgacttccataccgcccatcagttcttcctcgtcaacgtcatcagggatgttgtagcttctaccaagagtttcttgtatctcattgctcacgtccatcagatctgtcatttcatcttgcatattctatgaatagcaggaatgtgtaagtacaactcaagatactgaaaaaaaggatgtaagtcacatgtcacaataatctgggtgtacttttttctctctaacacataggagagttgtgtatcattatattaagaatgaaaaacggggcaagaacccttataaaacacacccatccgtgtgattttacaagcttcaacaattgtacgtttattatatagatactaaatcgcctaaaaagcttcaaagaaaaggttgactttaaattaagggtgataggcaatctaataatttttggtctgcctttgagccaaaagaagagtacaataaaaatctcaaaatgtgtgtcattatattaagaatgaaaaacggggcaggaaccccttgcaaacagaccatctgggtgatgttacagtctgta

SEQ ID NO: 7294 - DNA, 897 bp, Zea mays
aaccctgccgatcttttatattagacctgcaggacgcatacaagctgcattccgaattttgttccctttaagaaaaaaaggcgatggctcttcagaacaggaacagctgctgcatacttacttattcccttactgtaaggatctatctgaacaatggttctctgagtgtaaatactgaggccttggtgactgaacggatggacagtggatcccgagaaaaaactgaaattttcttcggtgatctatagtaccagctcgaaggactttggcgtcgtccagaaacaaaagtgaatagacggacgcttatgaaaatcaacagcaaataaaaacttgtaggggatcagtaaaccgtgatacttttgagtcgtccacacaattttatgaaactgtcgcgttgtggcgcttctgtccgatgttgcgaaactattgggcaacatagagagcttacagcagccacagctaaaaatttgaactcaaacgaacgtggagatatgcttagagatgtttagtggctgtccatgaagtatctgcgctcgcaaacacatatgcacagcacaaccaaacctggaagaggatctagaagacctgggctactttgacatgcaaattctttatgtggccgacgcttaaaaacagagtttggacaacagacgattggccaaaagagggttgtcccatccaattgtttgtcctctttatgagcaagcggatgaatctataaacacgttcgtatcaaatatgcttcacttcttattcaacacttagcgaatttattaaaccttgttttgtcattcagttcactaaaattcactaaaagactatgtcactttcacagttcatgctgaacgctgtctgagtgtacatacaacgtcacatgcaatcgctgagttttggctg

SEQ ID NO: 7295 - DNA, 838 bp, Zea mays
ctagcttgcatgcctgcagagactgtctcgtgataaatatttctctaagccggcttttgacacagttgcgaccgaacactgtagttgcgaggtatttctccctgctatgtgttatctatctattacatattgatttctttgttccttatgacttaaatcgaatcctgcaaatagtattcattacacattcgttttcaattcgttgtatgtttgttaatctttttatgtggagttggttatatgttttctttttttcttcattcagataacttctgtacagtcgctaattgggtgcactgggcggagatggattatgggggtcatttcgcagttggaggagcgacagttctacttggaggatcttactggagcagttccaattgacttatctaatgccatatcctaaaaaaacagtgttattttttagcacttatggctagttactattatttgtgaacaatgcataacaaactttctacatcttttctttgtcaaataaaacaagtcagcattaaacttcttccagtcacctgtgaaggatgttgtgccaaggaatttcctcttatttcatgtgtggatttcgagattatcgagaaagtatcactactttccttaacatagaacacaaaatcacgtcaggtttttttgttgaaaatactgtaatcgtagccgaaggtgagctgctttcaaatggcattttccaggtctgtggttctcattttcctaaaaaaaattcaaaccttttctgtattatcagttctaatggttgcaactgcgttcaaacccatgcacaaggtaaaatacctggtggaatttcccccccctggaaggaccaaaa

SEQ ID NO: 7296 - DNA, 776 bp, Zea mays
tcaacgtgtctgaaacaaatcctccaggaacttaaagaggggacaatatttcgaaagatgcagccattgtgctgtttccaaatggtccaagccaccactgcaacaatttacataaaaaaacgccctccaaagatattcttcgcgtcttcaaacatgttgaagaagtcaagaggtaaaaaataatatttatataagaattattgagctttatgagatctataactttatattttttaatatattttgtttatagccatattaatgttaaaataaataaataatcaaaattatgttcaaatctatattaagtaacagaatatagtacttgtcagtttccaatactacatactttctatgattctatcatttgcttgtttttagatattgtatactggttactacaatatcaattagtgtaggagttgattgcttcacgtataatctgtagctttttagatttcatcatttgcttatttttataagattatgtaacactctggtgttactagaactaaaacttaacatgacatcatatgtatcatatgcattgacatggttgtgttgtaatccacctagaatgcatttactacagcgccaacaacccgattagctactacagcgccaacatggttaagaacaaagtgtcagcaaaatgtcatttgtcagtaaccggtgcagcagcttctccaacgaaaaaactgaacgggctagactcatctaagcaaagctccaggagaaccaacaacccgattagctactacagcgccaacatggca

SEQ ID NO: 7297 - DNA, 823 bp, Zea mays
tgcaagtaaaaggtaatattaatacattacagtgacaactttggctaccaaaagtaagagaaagctatagacactttctagtaaaacaagaatatctgatattttgggcataggtcacagttaaatcatgtcagaaaatttggattctaatgaggcataatgtaatacttcctccattccaaattataaggtattttggcttttctagatgcatgctctgttcttaaggcgtcgcctaggcgtccgggcggtggtctaacgcctaggcgccttgcccgcctacctcgcctaggcgccgcctaggcgtccaggcggtggtccaacgccttggaccgccttatcgctttaaaaaccatggataatgtacctaaaaaaagccaaaatgtcttataatttagaatggagtatattgcactctttactcctagacaaagctctaagtaagaacaactgcttctcaactaagcacttttcattattagcatgcatgcatgacaaacaagtatcacaaatccgcataatggcaactcaatagtagccagtcccgcacctcattcctgtaaatcacaactcagtctactagtgatttgtgcattgcataaaccaaagcaaatgaacatcaacaaacagtatgagagctcactggatgaaaccagcataatagaaccgcctcacctttcccatttcaatataaactgctgcccggttagtcaaataaaaaatatcctcgtcgtcatgttccaaggctttggtgtaatgctggatcgcccgctcgaagtccttcttcttgtaagcttgtgtacctaactccttctccttctga

SEQ ID NO: 7298 - DNA, 743 bp, Zea mays
aaagttcaatcaacggttaaaaaaagtgatctgaatccggtatggaatgaagtgcttaagatatctgttcctcgaaattatggacctctaaaacttgtaagttttatcattagaaccttttaattattttccttatatccaaaggattctagttcaaataagagtacaatatggtaagtgtcatgaattatggcaaagtccttagggtgtttccttgaatcagtcacattatacttccctatgtcccaaaataactgcacacctcatttttctggaagtcaaactttttaaagcttgactaaaattatagaaatattatcaacatttgtatatcctaatgtatattatgaaattaatctaatcatacttattgtgcatcataaatattagtatatttttgtatatgtttagtcaaattttcaaaaagtttgtcgaagaaataaaacacttcacattatgcttcaagaaaagagcagagtgttgagaaagtagccaagaaaaaagctgctggctattagcgacatgaaagtaatacacataatatctatgtccaggaagtgtatgaccatgatatgttctcagctgatgatatcatgggtgaagcagagatagatctccagccaatgatcacagccgccatggcctttggagatacttcacgtcttggtgacatgcaaattgggaggtggttcatgaccaaagacaacgccctgatgaaagatagcacggtgaatgttgtggca

SEQ ID NO: 7299 - DNA, 777 bp, Zea mays
aaccatgggaaggaagtacaactgcctatggctacaagaaggtattgatatgacatgtcccatacaggcagaggcagcaacaaggtagtaacatcacacatgtcccatacaggcagaggctcacatccaaatgatcccataaaactgagggggtgtttggttctcctaactaaagtttagcatgtgtcacatcggatgtttgaatgcccattacgagtattaactattaaatataatctaattacaaaactaattacatagatgaaggctaaacaacgagacaaaaaagtctaattaatccatgattagcaaatgtttattgtagcatcacatggacgaagcatggactaattaggcttaaggggtaattgaatgcactagagctaatagttattggctaaaagaattgatagtggaattaactaactaacaaatatctagctaactattagctaatttgctaaaaatagctaataattgaactataagctagactgtttggatgtctttagctaattttaacaaccaactattatctctagtgcattcaaacatgggcttaataggttcatcttgccctttagtcctcatctgtgtaattagttttgtaattatattatgtctttaatacttaactagcatccaaacatcccataaggcaaataaaaaaataaacaaattgacattatacaaaaacttaaagatactggtcactctgtttcactattgtgtaggccttgggagaaaccgttctaccatgtttgtccatttatggaa

SEQ ID NO: 7300 - DNA, 788 bp, Zea mays
tgttggctgtctggccggggacgtgtgtgtctatatagtaagcagcaaactacttactaatttttttatttgtcatattttagtttaaaaataaactaatcgatgacaaatattcatcaacaaatgtaatatatcagatcctcctgtattctggtcctatatttgtagaattgttgatgggattaccagagaccagagtacttcgatggaagcaacaaagtttttaagaatttagtttttatctcctgtttctagaaaccggtttaaaaaaatatttatcgatatttggaaccaccttaattttcataaactgtctttagctaggtagactagttttttggtttttaagaaactaagaatccaatttctataaactagtgtgtttaaaaataccttagtttttataaatcagttttttaaaaactgtttgtttccacacatacctttaattagttggacaggccgtgtcaatgatgatgaccattctttatttcatgcaccgccagtcgtatttcctctctctattttatctgatctctcgacgcatttagaaatctcgaagttcatgacatatgctaaaaacgatggatggcatgtatggtatggtcacatcattttcccaacacgtcctagaggaaactccagtcacatctcggattttgcttgctatcagagtgtacgcgtgacgaggaaatcacgatcgagctttgaatgcgaatcctactacccgcagagaactgttcatgggaatggaaatctattgttattaaattttggatagcaagaga

SEQ ID NO: 7301 - DNA, 890 bp, Zea mays
taatttttttttatcgcaaacaacatgtgttataatagtgcttagagccatgcctaactatgttttgaccttttgcagcaccaacacaactaaataatgctcctgggttgtttggtcaagggaatctaccactggcttctggaatggtatgctgtcatgcaattgagttctgagcatacatgggtatactacatttggttgtttgttatggggattcaagaagggtttatatttagaggcaatatttggtttaccatgcagtagttatttgtggaagtcaattttgacttgtttatgttaatgcaccacttattgtccagcgctgataatgtatgttgttgcagcaccatggatcgatgtatggtcctggatcctacaagggacgccagcaaggtagcaaatttggtggcagtactacaagttggagttctgctggccgcagatttggtactatcgacttgagtggcaatcaacaaaggggcagcatgccatttggtagtcacaatggctctctggagttcatgaatgagcaaaaccgtggaccacgcgctacaaaaccgaagatacaaggcacagagaacacctcaggagatgagagaagcgagaaaattgttcctctgattgatagcgaactgtacaatcgctctgattttataactgagtacaaagatgccaaattctttgtaataaagtcctacaccgaggaccatgtacataggagcattaagtataaagtttgggccaacacagcccagcgggaacaggaaactggattctgcttaccatgcaagccaagagaaagaagagcattggccctattttcttgttttctcagtaaggaacagctcatccccctttggttttttggcttttcccttcggggaaaaaaa

SEQ ID NO: 7302 - DNA, 800 bp, Zea mays
cctgcatgaaggcagcgggagtctatcttgctcagggcccagttacatgggcgggacaggagggctgcaattgcccaatgctgttggcataagtgcaaatatctgggtctttatgataccgatgtctctctttatttgatcgtacaaagcgaggttctgcggacagcttggacgcagcatggagcaagcgtgatccaagacgcctgctacgttagcaaacggatgtcgcgagtcgctaaggctctgcacaaaattggaggaacataagagatgagaatagcctgtaaccatagcttctccggtctcgataacaaggcgcgtcagtattttaccttgattgaaagaaccgtggcgatgccgttcgatatcaggtcagaaggaagttgggcgccacgggcaggttcaaaacctgggcctgcacaacctgccacttgatttgacgtgcataccttttcatcctcattacctccagggttcgcctatgtaacataagcaacatatcgaagaaactatgagcaatctgttgtacagagtccagtaattgccagctaggttttgacatacctgcatggctttgtcaaccatctgcctggcttgtgatagtgatctttctgcaaatgcggctatatatgactctagctcatcgtagtggccagcactattattgtctgggcaatctctagattttgcagggctgtcagatgtactcctatatggtggtctttcactgtttacaatagattctgcctgcaagtgaagcatcaacagaaacttagacctcagatactaaccatgacatt

SEQ ID NO: 7303 - DNA, 829 bp, Zea mays
tgcatacacttctcagaactaaatgatataattaataacacgactgttcgattaattacctgtcggaagaatggccaaggccaaagcactgctctcctctatcgccaacacagtaggggttgaatcacctaacccctatgagaaaaatatggcatttagattataataaatataaaaagaataatgtcactcactttatgaccatttttatacttaccagtaaatcaccagtatctgcaatctcaggcttgggaggcaaagctatttgggaagaaggaactggagcaatttcttcaacaacttgcagtttctccgctacaattggaacggtatcatgaacttcttcttctggtttgtatgtcagaagaagccgctcaggaagctcctggtgaaataagaaggatagtccgtatttaagaatccattccacaataagtaaatcggctggtataaacttgacttgacggtaatcatttatctcccaaaaagagtgtgtgacattcacactgatgacacaattatcacaaaaatgtcaaagtaaaagagaaattgttcactaggccacaattattgatgttaactgtttccctacatcaggtagcttgctgtcgttagatataaaagaagaatgaagttgtgatcagtgcaagctacattgagattagggggctcaactcaaatgtaccccctataaatgttaaagcaatgatgttgtctaatttttcaccatacatacaaccccttgggaacatgtatgtgcaaggtaaggacaccccactaccattcaccctctaatttgcttttagtttcgccatggttgtgatatgcc

SEQ ID NO: 7304 - DNA, 784 bp, Zea mays
aattgttatatcgacttattggctgtcgagtaattctctcttaattcttgcaacaaataagttggattagtgaaagaaactggtttttataaacacatttactttgtttgtttgtatttttctattttaactaagccaacatggcaccgcttttccttttgtattcaggcagaaggagctgcaaaaaacaattatctggtgcaatatgctctagcccaggtaagctctatttttttctgtcattttttttgcttgaactggtcatttgtgaatctgtctggctatgtcttgcactttatggcctattcaatgtataatagagcagttcaattccttctatgtaatagcttattcttagatctggggaatcttacgcaatttgaatcaatcctgctattgtacaggttcttaaagaaagcttcaaaatttattgtgcaataaatgatggaattatcaaccttattgacaaggtacgttaatcttcaaagtaggcattcgtctatgttgcactgagctatttctacttatgcttactgtttcctgttggctgtgaaacaactgtgcagttctttgagatgccaaagcatgaagcactaaaagcccttgacgtttacaagagggctgtccaccaggtaactgccttacacggtagtaatatgcaatgtattttaacttgaagaagatcaagacataacaattatgtgtgcttaaacgcttagctgaatttttacccatcaaacatctttgatgcttcaagctgggaacctatctgacttctatgaaa

SEQ ID NO: 7305 - DNA, 798 bp, Zea mays
tgcatgcctgcaggctcgttgccgtttccttccccgtccccgactccccggcaaggccgcaggggtagccgggtaggtgcagtgcgagactcgtgcagtgcagtgaaggtaggtagttggattgaattggatcattggacggaggcggcgtgtgtccatgccatgtgggtccagactccagaacgacgggctgtggacttgtgtggtagtgggctatacgcgccacccattggccaattgtacatgggcctccggaattaccagcccatttgttaaaaactgaaactgggacagaaaagccggaaaacgtattaataaataataacaaatatataaagtagacagaatagataaataaaaaatataggctgctgggatctctcgccagcatcccaaaccagcacatacggcaagtcctttctttattacctccaggtataaaccttttttatgtggcaattttgtgctaataatctaaatttcactaaacatagttcatatgcttgtttctttctgaacaacaagcaaaaaaaaacatcatgtatagtcaaatgatgtttctttgcaatgtggtggtggtatacatttagctagtatgacctatacaagtcagcgtcaaccgtcaatcacgtagctcgtagcttactagttagattgttcatttttttataaaggctgcatccataaccatcttctagatcaaattattactatctgcgtgtttggttgcgtgacgcgctcagccagatccttcgcatgcattgactcagtgcaggctaaaaaaaaggctcttgcctg

SEQ ID NO: 7306 - DNA, 778 bp, Zea mays
gcttgcatgcctgcaggcctggttgcaacgtacacaactttgcgagcaggatggagtgctataggtgcaatgcaccaagggaggcaggtatgtgtctcgtcggtttacaaccaagattttacattttgtgatgtgcgtattcagttaagcttacattcaatgatcggtcaaggaaagagcatcaaaatcttataacaatggttagtcttttagatgctagctatctaatcaatcaatcttgatgcctggtgaagtgcccttttgatcttctattatccttcttccaaaacatcaatgcatcttttcaaaatcccatctgctctgtagcaggcaccgggaggtaagaggcgactggggtgataccaagagcgtgagatgtgacgagctggcggagcagtggaacctactgccgtcacacactcaccatcaggcatccaggaaggatgacgagtctactacgtacacgactatattgctgattgccgcgcgtagtgccgctgctgtggtttgcgtgggtggagaagtacccaagcgcaacacctgttacgtgtgttgtttgctcctttttgaggttgtgttgattcagtgacagctgagttgtacggcctgatgatgtactcgcattgtgtatttgtcttaaacagcatatataattatgtaataataagtgcttgcttatctatgctctgctgatgcatctgtcattctgtctccttgtattggcaatgttttgctccttggatggttttcaaggtggtttagtctgatgtgggaccat

SEQ ID NO: 7307 - DNA, 821 bp, Zea mays
gcgggaggcgctggaggaggcgtccgaggacgggtccctcgccaagtcccgcgacgtggcgctcctcgatggaggggacggcggtgcggaggaggggtccgtggggcggtcccgctcgctggcgcggctccacgcgcagcgggacttcctgcgcgcgacggcgttggccgcggagcgcgcgttccagtcgccggacgcgctccctgtgctggaggaggcgctggccaagttcctcgtcatgtaccccagctacgcgtccgcctcggacgtggaccgcctccgcgccgacgagtacccgcacctggacaaggtatgcctcgactactgcggctttggcctcttctcctacctccaaagctgcaaccctgcggactcgtcagcggcgttcacgctctcggagatcaccgccaacctcagcaaccatgcgctctacggcgccgccgagaagggcaccgcggagcacgacatcaagaaccgcatcatggattacctcaacatccccgagtccgagtactgtctcgtcttcacggtcagccgcggctcggccttccggctcctcgctgagtgctaccccttcggcaccaacaagcgcctgctcaccatgttcgaccacgaatcccagtccgtgaactggatgacgcaggtcgcgcgtgacaagggagccaaggcatactccgcctggttcaagtgggcccacgcctcaagatctgcaccacgggagctccggaagctgatctccaccaagaagcggcgggcgccaaggactcccgccactggcctcttcgtggttccctgtgcagtcgaaggtgaccgggggcaaa

SEQ ID NO: 7308 - DNA, 818 bp, Zea mays
agtaagtcaccatttgaggactctcttatagtcttatttcaagttgactattagccatacagagaaagaggcatacctgttggaccagtgtatactgcaagctgcctgtacaacaaccattgggatcaaagctcaattgcatatcccaatcgctcagctaaaggcattggaaaaacaagtagaaagtctagcagcttactcagttgcatatcccaatcgctcagctaaaggcattattcctagcatgctgaaaagaaaaaccaatccctgcaattttaatgtcacgtgaaccatgtcagcattaagttaacagggggggggggggggggcaccatagcactcgatgaactcagttgacgacggtctcctagcggcgatgagacatgtacaagtagcatgtataaccggaaaaaactgaactcgacatgtcatgctgttaaagagatacactattatgacatactccctttgtcccaaaatacttgactttataggattcaaatttgtcctaaaatacttcacatttctcactagtcaatgcacatttctctatctctacctatctatctccttgttttctgtgcaccacagcttttcactatttcttaattcccgtgtcgaaacctaagggcatatacaaccctgacaccatggtgctattttttgagtaaaagacacagctaaggtgtatgtaagtataatgggggtgtatgtaaaccttgtgtcttattcaataaaaaatctctaagatatgaatcatttatgagggctgtatcaggggtgtgtcttgaagaaaatatggtttcctaagtttttac

SEQ ID NO: 7309 - DNA, 793 bp, Zea mays
ttgcatgcctgcaggtcggcggccgggcactcctcgcggcctgcctccgtcgtcgtcgtcgtcttcttcttctgctctcccagcaccgccaggtggcccttctcctggaggttcttcaccgtgtcgtacagcgactggctcaccgggcggaacaccaagcccaggtcccggagcttctggttcgagaacctgtacgggcgcttccgcgggttcacctcgtcggagcacctgcaccacacgcaccaaacgctcgcacagtcagctaggcagagcagacactacaagaaaacgtcgaagaaatgtcgataagtttaaaagggacacttttaatatagataaaagtgtgagtttgactgtaccgatactcttaatatagataaaagtgtgggttttcttgtagtgaggttccagtcgtgatcatcgccggctagtacatgtcaaggccatccgtacgtacgtcatcctacaaaaggtaggaacactcaagcagaccaggcgatgatatctatctatctatatagatgttgttgcagctggccggctgagacaggcttattctgatggacatgccaaccgctaagtgccgttaaaaaaagatattattattagctagctaggtcatgaaggtatatatataatatacctccaagctatttttgtgaccaatatcaaactgtttcccatatctgctcttgattgctagcttgtgtatagaccaagtgttgttgtagctgacctgagacagggctaattgggatggacatgccaaccggttaaatgccgttaaaacaag

SEQ ID NO: 7310 - DNA, 737 bp, Zea mays
ggcggtgaacgccagcatcgggcacgtgctcaagtacctggacggctccgcccgcaccttcgccaacgctgtgcaggcgtacgtggacgtgcgcgacgtggccgacgcgcacctccgcgtcttcgagagcccccgcgcgtccggcggccgctacctctgcgccgagtccgtcctccaccgcgaggacgtcgtccgcatcctcgccaagctcttccccgagtaccccgtacccacaaggtatagctagctacagggcatctcgaacggtacctcaaaataaaataggattcaacttatacaaaaaacatacatacgcgtctccgatattatcttaaacgtgtgttctattgtagactcttgacccctaaattaaaacagctccagcaataatctattttacacatatattcttatcaaacaatataggcattataatagaaagtgacccaaatatacatacataccggattaatgtcatattcttattttctacatgatcatcaaccttttttaaataatatagtttatttccatagacatgcttatttatagtttaacacagttggaattgaatttatatttagtagtatcctaaacactttaaaatatagcgagtagtattttgatttgcgggacactattttatggcacatgcatggttgaaataatgctcttatatatatgtgtgtcttcatgacctagctagctaatactaatgtccatccgaccatccgtcc

SEQ ID NO: 7311 - DNA, 798 bp, Zea mays
ttatgttttgaaacaaaattttattgcgcacatacaaaatattccccccttgattatattttcgctgaacatcattttgccctattgcagttacgagctcgtcagtttggtttaatctgccatttgccatagctctgattgttttgttccgctacatatcgcttgattatggccttcgtagaaagagcgtaactagaacagatcatgccagtcattcactcgtcaaaacaaaaagtactgaggtaaagaaagtcattcatcatactgaaacggatggaaaaatagattggaagagcaaggttaactcgcctccagttgaagcagcattcgaacagttcacaaggcaccttatctcagaatgggtaacagatctgtggtactcgcgcgtaacacctgacaaggaaggtccagaggaactcatcgatgtagtcaatactgtccttggggagatttcagttcgggcaagaaatgttaaccttatcaatctgctgatcaggtagaaaatcttgtttttgtgcaataaataaaaacatagatggcacaatgttttcagaacattagacttctaatactaaagcattccctgtgttttccagggatttggttgatcttatatgcaataatttggaactttatcatttctgtcaagccaagattggaagagagaagtttgtggaccttccttcagagcgtcgtgatgctgaactgaaaatgatccttttagctgaaaagcaagttgcatcctgctttattttcagctggcgctgaatacaaggtcagacttagtggatggtgaaa

SEQ ID NO: 7312 - DNA, 812 bp, Zea mays
ctttctccaacttattggcatgcgaaagagcaaaggattcgattctttcatttataaacctgtcaatttaacatttaaatacgatgacagtaaaaataattatttgaaccaggtccagtgagttattaccttggatttgctaagttcacaacaggtctcaaaactgcacaagcgagaagttcccgcgctgtacaccggaagaaagtacattgtagatcctgaggcttcactgtgattgagatcaacccgtcagcaagacttttcaatacctggagaaaggaaacatatactagaatcatcagatgacctaaacagagaaagagatatattcctacaatgatcaactcaccaacaagcttatgtaagtgcaatcaagacatgaattaaaaaatgtgttattgaagtgagtaaataaaatgtgactgaaaatgtgaaatctaattatccaattgtgcaataaattaccagaagtgcttaacatctatatattgaagtattgaacatgcacttggtcatggaaatccatctattcttatacattataatagaatacatgtattattaatgaataatgatgaaggggaacatttacaaaaggacatagcaaccaattaactaacaaaattctatgtattgatcgcttgtcaaaattgtgttgtgttatgctctagatgtatggcatgcattcaagtcatctagatctagcattctagatgaaggggtgatatggtcttatctagcatcatcttttgcacacaagttcattgtagagataataagatatatgttgacctagcagcactcagttataa

SEQ ID NO: 7313 - DNA, 845 bp, Zea mays
atcttgcatgcctgcagcactcaccgcgagcaccgcttgctaggctgtcagccacgtctcgagcatgtggggaggatacgttgttgtgctagcgagttgaactaaggtgtgtttgtttctcgatattacaggtgattgggaacaagtgggacctctacctcgacctcctccaggccgactactcggaagggtaaaatctcctgtcttttcatctcagggctcttatattgtggttttatcactgcatctcgagtggtgtttctgttgcatcgtgctgtggtgttttaagaggtttaaaacaagaagtttgttttggtgctgaggtaaagatatgtgatgctctgcacaagtctgagttatgccaaaaagggatacggtttctattccttttctccctatataaataaacatatccatttataagttctgtcaaagcagcccctttcctaaaatttgttatgaatcctggcatatgagatcaattatgtgttctcttcagtgtggtagctcttgttaattgcaaaactttagtaatcttttttatatttctaaaattcggactctatgctgttaagaatatcaatgcaatatgctgtatatgttgttacagacaaagataaccaatagtgtattgatccatagttattcaataagagattgtgcatgtgcatactgaattactgatttagcagtagtggcattgttaattgtttgtgtccttgactatatgcctgataacgattaacagtttactgaccagagatcactgatctataggtagttttatttgtaccgcattaaagatttgagcctctaactttattgtatggatcaaatggcaatgg

SEQ ID NO: 7314 - DNA, 977 bp, Zea mays
gcggcacaggaaaatggacagagcagaactgaagcaccactacgcgcagtgaagagccacgacgcgggcgcaggagaagcagagaggtccggccgacggcgtcgttggacgagcaggagccagggaggaagaagaacgcatagagcagggagacttggcgaccgagcaccagagagctgcagcagtagcggaacagttccagagcatccagagcatccctggcaattgaaaagcatagaaactgagatcatgaaaatgctaccagtttaagacaaatttgtgaatacagactagaggcaatctttaacgatacttgatagaaaaatacaaatcaagcacaataacaaggacacggagcccttaggctatctccaccagctctcctatcacattccttatctcaccttctattttaaactccactctgcaaacaatattatctacaatttaaaataatgtttctgcacgaccatatgcacgatatgctggacacaaccttatatgctcagagaactgagtaggtcaaaatctttaccaactgcgatgcatagcacaaaatcataatatactatagtatatttagattactgttgatagatgagttttcctttaatgattgatgggctacattgcaaacaagagtgaatggataagctaggaaggggggctacaactccatcgtcatctcagaagcatggccaatttgtaaccaccacaaccagtgtgtgttttagggtctctttcctaaactagcaggagtgctactagttagtgaggagatgcagttttggagtatgaccagggctcaaaaggattatcccatcttatctgcactcgtgtcagagacaaggctagtttcaagcaagatggctaatcttatctctaaccagaatcctaatgaacctttcatactaaatgacccagcccatatggcctagctgactgcacccacgacaggtgtccactggtttaataga

SEQ ID NO: 7315 - DNA, 747 bp, Zea mays
gccgccggcgccgcctggccgtccccgtcgggccgcttcgcgttcggcttctacgccacggacgggggcctcgccgtgggcgtctggctcgccaccacccccaacgtcaccgtcacctggacggccaaccgcaacgtcacgccatccacgggcggcgcgctctgggttacctacgacggccgcctggtctggacgggccccgccgatggtcaggacaggcccctcgcggtgccgccgcggcctgccaccgccgccgccatgcgcgacgacggcagcttcgtgctctacggcgccgacggcgccatggtctggtccaccttcgccgccgcgcccaccgacaccctgctcccgggccaagacctcgttcccggcgcgcagctcttctccagcgtctcgcccaccaacagcgccacggggaggtaccgcctcacgaaccagatcaacgatggcaacctcgtcctgtatccggtccagacggagaacaccgcgaacgccgcgtactgggccaccggcacgttccagatcggcttcccgctcaccctgcgcatcgacgccaccggagtgctctacgtcaccggcaacggcggcaactacaccaagaacctgacgcttccctgggccgcgccgtcgcccggtgaggcggacgttttctaccgcgtcacgctcgaccctgacgggcgtcctttgcctgtacccggcacgccgtcacgcgcggtggctcgtggacgaaccgcgtccagtgggtag

SEQ ID NO: 7316 - DNA, 767 bp, Zea mays
gcatatgtcagagcagatacaagattcttctaaataaagataattaaagtgcatatggccataagttgaacacatcatggtatgaaatcaagctatttgctagtataatgtatcttttatttatagtttttcttattggctgattggtagatttcaagtggttaggcttctctaaaattgcttttagtgctaatggtccttatcagcattattggtctcattgcatttgtgaaaaatccaacaatcagtcaccttatgccagccttttcatgcacatggccatgccccattagttgtacgacttaaaaccatagttgttaattctaaagcgaacctcttttcttcggaaccaaattggactagctttatttgggaatattgcaatgcaggaaataaattcatattgatattggtttattcttgagtcttgactagtcacaaggaaaggaacccaccagaaagccctaaccaaatctgttaacaatttagctaagccaaatgacataacccttaaattatacatcagcaggagcaacaccaccttttcccttctttttttgttaactcaattgcttcatttagcactgtatcccctgtactatgttaagatggtttagagttcatgcaatcaaacttttttaactaacttaatatgtttgatactatggaccagtcggtcgagtcctatgaaaattgtatcattatatttggagttaaaaatgatttggatgtgctgttgttatttaatatcccctagtatagtaatt

SEQ ID NO: 7317 - DNA, 786 bp, Zea mays
aacaacgattgattgtccatatatatgtgtgtatgagtatatatacacaaccattttcgtgttaaagcaaataggaacagttaaattccacagtggaaaattaacttaagctggtacaagaaactaatgctgatgatcgaaggtttgtaagatcatgtgaagctccacatgcatggtccagcctgaacatctgagatgttctgacaaacgccatgcaggcatgcagatgcaaggcggcatgtacatagcattatagcaaccgtgacgttaattaaccatgattatggctcatatatttttttgtgacgccgcagaggagttttgcatcgagaagattgaattcgaggagaagctcaacaaggtgattgtacgcgggaagttcgacggcgagaagctcaagaaggcgatactagacaaggccggcgagaccgtgaagatcaaggagatagccctcgtcgacaagtggccacccccacccccaccttcgcctcccccgcccaaaccggaatgcaaggtggtgccgtacccttacccgtacccgtatccgccgtacccgtggtcgtgcccaccacctcgcccgccgtgccactgctgcaagccgccgacaccgtcgccgtcgaaaccgccgtcgccacagccgacgccgtgccagtgccactgctgcaagccgccgacaccgtcgccgtcgaagccgccaccacagccgacgccgtgccagtgccactgctgtaagccttcgggtaccatcgccgccgaaaccgacgccgtgccagtgccactgctgta

SEQ ID NO: 7318 - DNA, 794 bp, Zea mays
tgaaagcacaccagattagcaaagctcatttgtctctatatgaaaatacaatattttcctgtgttgcctctatagggatgtacggtgttggctagtgagttagttttgtttagcatttagcactataatagaaaaaaactcgttagcactaggatctctttctgggtattcctagtttaacatatagtcccatttctgtaagcagcaaatgtttgtgccattggcttggcccacattgtgaactccattttcttcttaaggaaaccatacatagttctactacgaattaccggaaaaaatctcctaggtgttcttggaaggttggaagggaaataacacaattcaaattgtgatatgaacttctgtttttgtcattttgccacagaaaatatgatatacaaaacaaggtagcactgcggcagtactgcaataccaagttaccaacttatcacagttatcagaactgaggcatattacctgtccacgaggagcagaaagcatatttgcccatgtatgctggggttggtacacgactaaaggtttatggaagagataatacactgatcctaaacaaggtgaaaaaaaatcctaatacaagccaaattctaacacagataataaatgggttctaagacctaacctaccaataaagaatcctttgcgtaggagtactggtaggattgccctcaggccacattggaactactatataagctgaaaatctctcattcgaataaatcttgtttgcaattttcagtgctatctcaatgggtatcagattattagcacctgcc

SEQ ID NO: 7319 - DNA, 786 bp, Zea mays
atactttccttgctcttcaatccgcaactgcaattttctctgaatctgcaatataggaatatatatatatagtgttaggataaagcaaacttcattggcattaatattaatgttgggcaaaatcacttagggcccgttcgtttgtgtccaggaatggacacaggattcgttccagcttatcaaaacttatataaattagagaagcaatccgactaggaatcgttacaggcctccaatccgtgaaaaccaaacagggccttgtggaatcaacactaactgaatttagaattagtacctcaagctgttcatgaagccgtttctggacttccatctgaaggcgcagtgcttcagtaagatccatgctcctatacaagaatgcccaatatcatggaagagtattaaccaagaagtaacagacaaagatgatcgtaaaatgcactttaacatataggaaaaccttcaaattagattttatgtttcaaaagaaacaacaaaagtgaatgcaatggctcaatgcacatcatgacaattccataactagaagagggcgttgacacttgacagatgcatcgaacactgagggcatgatctatgctcggagtatctattgttaaatcccagaccatgattgtaaaagcatttctgttgtaaaaaaggcccttcaagaatagatttgaaatagcttgtacgttatctcatagcccttaaaattttttactgcatgggaaataatgcaaatcgatggatgcaaatgtgtcagcttacaacagtctgaaaatagatcaa

SEQ ID NO: 7320 - DNA, 792 bp, Zea mays
cattttgcatgcctgcaggtttgctgtttagctttctaagtagtattcttgcccaaaggaggccttttcattttcttatttgaactcgtttgtgttgcagaagtaccgcacagcccgctataaaccagacctgtcagaaggtttatttgcttggcctcttcccaacctattttctctgcgttgtggattacattttgcatgtgaaatgttggggtcatgaagctttcatcatatttatttatttgtgtcatgataaccatgtcgtgaggaattctgtgttgcagacagcatgcatgcatgtagctggatcaaaataagtgtgagttgttagtgttaatattacacttctttaaatcattatgcaggtacatcggaaaaaaggacagccactgaagagctggtcctggacctgaaaacgtgagtgagatacttgccatatgtaatccttcatttcacttgatggtgtgctatttgtctcttttgatggtaactgttaccatgttactgtgtgattccacatgcattgaagcgaagctctggagtttattcacatttgggttatggttttgattgacactcataatttagcttgaaagaaaatgctgtttgagattttcttttaggtgttactgtgaattcttaaggattgcacaaaataaggaggcacttaaatgctttgtattcaaggctaatggaaaacaacattctgcgtgtttgaaccttggtttggggcttttgttgggtttcaactcttacctactttaaattgcttgggactaaaagctttgttgt

SEQ ID NO: 7321 - DNA, 838 bp, Zea mays
tactcctattaggattgtattgtctatgtgcatgtgcttgtctgatgtcttgcatctttggtactccgttcctctattccaaattataagacgttttggctttttttagattcatagctttcgctatacacatagtatacactatgtctagatacatagtaaaactaatgtatctaaaacaagtcaaaatgtcttataatttggaatggaggagtatataatagctattcttcatatatctacattgagtgggagattggagtctgataggagctagaaccctcatatgtcacaccagaatgaatgggtgattggagtcgaatgtacagacttgtaggatattccggaaatgttttagcatgccttttgatttaagcatgtacctgttaaaagtcttctgtgttttccaggttaatggagttggaaagaccgcagttacagtggagtacccagagcgtcctggacagcctctctgtgaggtaaataaaccaattctaaagctatttctgattgatattttaggtccaaatgtattatattttgttgtcatgtggtggaaactctggttacgaatgttcttgttattttcagtactatgcaaagaatggcacctgtaaatttggttccaattgcaagtttgatcatcccagggagggtggttttgtacctgtcacattgaacagcggtggattccccctgcgtctggtgggtgttctcattgcaatccacatttctgtttaatctaggatcttgtttgtttattttatgaaaaattccatgtttaatgcagggtgaaaaggaatgttcctattacatgaaaaactgaacattgcaagtt

SEQ ID NO: 7322 - DNA, 854 bp, Zea mays
  unsure (1)..(854): unsure at all n locations
gcacagatcaagtcctcttctctgtttccagccgccgcacttcaaaaccctacctatcccctaagtgtcgccccgccaacgccccaaggacgccctgcctacgccccaccggcaccttacgccgcggcgggcgccttactccccggcgcaatgcaagttagaggccttgccctgtgagcgcgccttagcgctaaagcaacgctaaggcgatgcttaatggacgccttgataagcatgttctagatgttggctgattataaatacatgagatcaacttcatgcagatatcttctggaaacatcaagcaactcatagaccgaagctaaaacacaagaaaatattcaccttaacaagttattcaacacattttaagtggaagactggaagttaaaagacagcattgacctcagaactagagcaaccgcacaaaacatatacatcatagtgaatccagcaatagggaaccatattccatcacggccttaccattgagaaaaatggaagtaaaaattgagtgaacaaaaaccaatagcaattgaaacataccatgcaacagacatccagctcgatggcagaagatcacagcttttgaatgtcttcagagctggaaatctgtgtgcaagagttgatacctgaaacccatgcacaattagattctgtatacatgccatcgttactaagcattagttcagataaagaaaaaactcgccttgtctgtcagaggctctctaccatatggaggatccctctccatatactgaaatattggaaaacttgaagatgcatcgccttcaccatcatcacttcgtatgccaccattntccagtcgatgtttaccttccagtgatgatgag

SEQ ID NO: 7323 - DNA, 818 bp, Zea mays
taaggatccggcgaggtggtgatgctatggattcacgaccttatttctgcctgggagatctttgggaatcattcagggaatggagtgcttatggggccggtgttccacttgtgctaaatggcagtgactctgtgattcagtattatgtgccatatctttctgctatccaactatttgcagatccatcaagacctgcttcaaggaacaggtacatcctattttgtttcacaaaactcatggtgtctataaagtttccattgcacttaaaccttaagagggccaacctttgtaccaaaatgggtttcaattgtttcttgtttgtctttgttatgcttcacagcttcagttcgtttgacctttgatattttcatgtatcaagagagaactaagttaaaacactgatggaattgtgctccatgttttttttatttttttacacttatgccaatatatctaaaaggaaataagtatgcttgaatgctattgagctagagcttaaggcagattaagcatttccaacttttctttttagttatattggcctatgccctttcaaggcaaattatgtcatatgttactgagatttactaacttggttttgtcaagaaattctatatgtgacaacattatgcagatttgttctctgttaactacttaacttgcaagaacactgagatgagagttgatatcttttgtatcacctgttattcactaggcattgctaggtacagcgactttaattggtggacatatatgtaaagaaattaaatgaagtaaacaaatgaaagaaggtgtgagtagatagctacaaccagcac

SEQ ID NO: 7324 - DNA, 754 bp, Zea mays
tcaatcatgttgtttattttaataaaatctatgcaacttttcacccaaattgtggatttgtgattttttgaataaacatgaacttgcgatatatgttgcacatatgaagttgttcttgttctatctattacaatatctaatacttcactgtctctcatgaatttggatgggtaaataagagcacaccagttatccactagcaaatcaggtagcaagcagcatgtttcgccaccattttttcttttccttcaaaaaaattccctggtagctggcgaactttttgtgttatgtgatgacactttcttatattttcttgaaacccttggtacatccaattctgctcaaggtttagtttcatcaagaatttcaaattttgaccttagtatttgcggggaacgataaatcctgaggggtttgaacaatcgacacatttcccccttgccagtatgctgaaaagttatcatgttttcttgccaaacatgatcatgttgttttaagtctatgattaaatttgattgcatccattatttacacttttctttctttgacaggcaatactgaattatgagaaggctgtccagcttaattggaatagcccacaggttagcattaaatcattattttatcttgagttcttgagtgcagattatattataaaacgaaaatataaaaggctccgatctgagttaatggacgatcaatgtgcacatataactgatataatgaccatcatggttcagtggagttaagtgtg

SEQ ID NO: 7325 - DNA, 906 bp, Zea mays
atagagcaccatgggtaattaaatttccttggagcaaaggttaagaataattaactttctctattatttttcatcacagcatgtaaagagataaattttttgaattactcccttattctaagttcatctaaatcctactcccttattctaagttcatctaaattctactcccttattctaagcagtctgctttcatcttttcccaacgcttgatactcacaacacacttgattcatatgattttgtgctatgcatctcaatgcttgattctgtaaaattacttgtcatatactctctagcatttggaggtttaaaatgtcaggtttgaactatttttccatacaggtttctctccagatcgtgtagctgtcagttctctattggcagttggagctgtccatcagcatcttgtcttgaatcttgagaggacacgcatagggttgcttgttgattcagctgaacctcgtgaagtgcaccatttctgtagccttcttggatttggtgcagatgctatatgcccttatttggctattgaagccatatggcggttacagattgatgagaaaatacctcttcaagatgacggacagctgtatccaaaggaacttattgacaagtatttctatgcttctaacaatggaataatgaaggttcttgcaaagatggggatttccaccctggcgtcgtacaaaggtgcccagatatttgaggcccttggtcttgcttcagaagtggtcagtaagtgttttgaagggactcctagtagagttgagggctcaacatttgaaatgcttgcacaagatgcacttcatctccatgagttggcattcccgtcaagaaccttaccacctggaagtgcaaaaaccacacttttttcccacccgggagatcatcactggagggaaa

SEQ ID NO: 7326 - DNA, 812 bp, Zea mays
agcagggtttgcccaccctgcaccgtcaccacggctgctgggagcttggaaggccatgtggatcacatctgctgacaggaaggccttgtagttgaggaacttgtcgatgaactcgtggttgcggtcaagggaaccaatgttctcatggaggagtatttccgcttcggtagttgattgctttatgcagaactcaaggaagcttacatctgaaaggggaagtgtattaaaattaacagaagtaatacaaaagattgaattatcctaacttgaagcaagacacagttagataccatttgttccagtaagcttggcccattcactatccaaccaatctctgaagtccattgcctctgcatgatgacagatgttagaaatttgaacatgatgatagtctttaaagaatacgagtaaaaaactttaggtataccagtctgcttgtttgtagcctctgctttccctttgccagattggtttgcagtagcagcagaaggaactggcaatctgcctgcctgagacttttgacgattcagtgcagaatgatccttcatcatggaacttctgctttggctcaacagacttggaaactcagacctggttacgatatcatggtaataaaacataaaaattcttgcagatccgtatatccatctttagtgatccaaatacaccaacgaaaatagctattaaaaggttttaaagtctcaaacaaattagacaagggaataaagctttaaattaaatttcaaaagagatcctttctgcaactatttctagtatgaagttcgatcttattttgttaatttagaattttg

SEQ ID NO: 7327 - DNA, 783 bp, Zea mays
attctggtgctatatatacacgtgtacacacgcatggagcgcgtagtacatcgtcgtcctgcttttagcctagttttcctcgttcacatctactgcgtctgcgtacgtacgtgtggtgtggtccgtcgttggcagctgtgaacttacccaatgctatgaatgtttggccctgccactgccactggtagatactatagctagaggggtcaccggccgtgtcgccaggggaggaccatgcatgtctcgctcgctagatcgggcctgacgacggcatgtgttgctattttcaatcagtacagaacggcatccagatcttcacagaggaacatactctgaagcatatgcaaccggaattttcggaacgatttacctgtgaacttttctgttgttgctgttgtttttggttgcgcgcgaagatacttgtgaactgacccagcggaccacacaccacagcatgtggtgcgtgcgtctccagcattcacagcattacgtggcaggcatacgtgtttttctctcctgcgataagctggccagcagctagcagcaggcagcagcagtgggcgctgcatgcccagcctcccaggaccagggcccaggctgcctgcacgtacaattcgtgtcatatccatccacgggaagcaaaaagggtcaagtttattcaccaggagaaagtcgtgggcagtagctaggtgcgtgaatctcgtatacatgtagtacgtacggtacgtcgagggctagtggaccgtggaaggcacaacagatttgttcatacctcccgggtct

SEQ ID NO: 7328 - DNA, 784 bp, Zea mays
ctgtataatttgtgtttccgggtagcacttgaaaaataatttgtgtttccggtttaaaaaataattaaacagctgctgtggtagcacttgaaagtcaagtagatgacttgttaacatgattgcagactagttttcctgaaacaggcatacattataagtcactatcactacacctttgaagcacgagtttcttcgtgcgttgtgtccgcccgtccccacgcttccagtgagagctcctccaattttcaaaaagtggggtggggcgaggggattcaatccctggctgcctggaacaaagccttcgactcttaccactaaaaccaacgcccgtttgtgatatataaagttgagaaattctaaatataattatactaatagtttgaaaataaaaaaatataattgtattcaaagaaatacttcatttaagcaaggtctacctatatgatatattgaaaccgtagtaatgtacgggtagctaactagttgaataataatggaaaaatctgtcagttggttattgtgctgtcgaaaatgattgctatctgtgttgtgcccactaggtaattgaccttatgggccacaaaggtagtgacattgatctcccgtagataaacccatagccttcattaatatctgctcatgggcacatggttttcttatttggatctcaacttttgcagtatgaacaaatggtgctggaggatttgctgaggaaaggtcatgctgaacctgctaagaagattggggcaggagtcgaagcatttgagataggcaaccacccggt

SEQ ID NO: 7329 - DNA, 845 bp, Zea mays
aaggtgcttcccttttggtgcctgtctatgtttcacatgtttttttatctttgtaagtcgaactcgaactcactatttcatgcctgatgttttgctcaggttgcactggagaacagatacaccaagatcatgctgggaacgtgtgcttccggaatagcatgccatgtgctatctgcaaccgtgaaggtatatatctgacccggtgatgtttgattcttcttgagaataatatgagcgagcgttgagagcataacagaattactaatttttccaggggcaaggctacgctttaccagctgatgtccagtatgttgatacgcgatgggaagtacccgtggttcttccacttcatgattgcctggcccaagagcttaacttgctctgtgaaattgataggtaaggtaaaagctcacctattagcctagttgtctgttgtccttgcagtgggtttttattataatggtttctctgttcagtttgaagacacagcaacttctcgataggccttgcagtggcatcaatggcttagtttcatcctttgtttcacggctaagggtagggcctcttgttcttggcatgccactttcttggtgacttaaaattttagctattctgtatgtgagctcaagctgtgttcttgtttgatgactacaacactacgtgtatgaatatcttgtggagctggagcaacacaagacatagttttgaatattttctcatttctatttacaggaagagaactcttctcgagagcataccattttaagaactgctcaaaagcttaagccattctcgtttaacaagttctcagcaaacggctaccatgatttcctgccatcgcggct

SEQ ID NO: 7330 - DNA, 767 bp, Zea mays
cttgcatgcctgcaggaaagcgtgtactttgctctgaacagctacacgctcgtacccaggaacattgtagcccactggcgccaagttgacgaggcgcctatctatcagctccatcaggtactgctctcctactttttccaccgttgtggccttgggtaccaggaagccctccgccatccacatgcacacgatgttgcttgccctgataaaggtattcactggcaatgcagcaaagtagaggaggcacgatttcaggtcatagtgaaggtcatcgaagcagagggatagaatcttgtcgatctgctttgactgcatcctgtccaggtgctcgaacaccgtctcccattcactagggtactccttggtccgcagaaggcctgacagaagaactattgccagcggcaacccttttgtgttgtccaagattctctgtctgtattctcttattgcttcgtcaggaagttcatttctgccacatgattggaaggtttccttgaacagattgatgactacttcttggtcataaaacttcggaacctcaagtttggcttcttgatagtgtgggggtggcttatgtggcggaatctgagaaatcctcactattctgctggcagcatcgacatccacatccttggggtcagggagcatagcgaaaatgcgattccactccgagttactgagctcagcatctatcacccaacagatactttcttttttcttttcaataattctccccggcaagctttccctcttctaatggttggccc

SEQ ID NO: 7331 - DNA, 758 bp, Zea mays
cgcagacagccgccatcatggaggtcagatgtttttttttttctcacccatttttatttagcagtagtttggtggtgcatttcagtttgctcggttacagtaccagtttcatatttttgctcagctcctgaagtctggatctatcctaataggaatgattaccgctttaaagtttgagtaagggtactacaaacaaaactgtcttgtgattcttcgtaggaagaactgctaatcaactagatttgatgtgtgcgattacataaatgttactcatggtcgcagcaaaatcttgcagtggttcatgttcagtaatatgcttttgctgtgctagataaactctgaaatttctagtgctatagttcgagtctgtgttttacctacatggagattgtgagttactaactgacctttctgtatttttctggtggtggcgatgatgcgcttcagatcgttcatgggctcgtaggtatggtgatgttggtgtacatgtatccctttttcttattatagtgcgactactcaaaacagtattatacacaaacatcagtcaagatcttgaacacatcagacattttatttgtcagaaagtttcctaggagggttggatataagaaaaaaatatgctttctccactgctgtggtattactttttttgtcactattctgataaatttatcttctttatagggttggtgaggtctccggtctctgcaactctttcacagattggatccaggttggtccttacgtggggtgtt

SEQ ID NO: 7332 - DNA, 810 bp, Zea mays
cgacctgcagcggattttttgtcgtcaaatctcctgtcttctaccatacttttaatcagggcgtcgtggttttcctgtggaacagtggaagcatgaaggaagaacaaatgatgagaaatcaatcttcagtatgcttcattgtctgtgtctttgattcacagaacttgttttgccacattaatactaccaaaaaaaaggagcagggagcgtacttgctgtcgatccgtcagtgatttttgtttgcttagattctttacaggaggaacaaccacttgctcctgcgtcatagcatatgtccacattaatgtgatatctgaatgagattttgcactatcttatactgtataaatgtttgccaggtaaaacttatagcacatacattgaccgttttaacttcttcaagctggtgtcccttgtcaaattcctgaatatgaatgaggttttagacagaattaaatgcaaacgtttttatttatcaaatagtcaatgctcccaagtagtgttttcacaaagctctcttcaaggaaatttacctcgattactgttgtctgattcatttcaggagtaaccacggcctgaatagctagtgcagaattgctgtggagcaactctatctctgactccaaggtggcgatcttgctttccaagctaaatgtattattatttttagtttatgagactttctcataggacatgagtacagcccaggaagaaaaaaatgtgaatgtgaagtatgagtattgtagaatgtacctctctatctgttttgatttatcctcgtcagctgatgcaacatccaatgactgcttt

SEQ ID NO: 7333 - DNA, 789 bp, Zea mays
gctgagtgccagatggtaatgaatgtcctatggactaggttgtctgagagaggcgcgaattggcgtcatgtgtataaggttattgaccctccatgatcattctgtgatattactttttcccatcaagtgataggtctttattccatattctaaattgaccatacaaaccaccaagaggagcaacttgtgtatctgattttcttaatcaatatcaatagttctgtttattaagataagactttgtgttcaggcattaactattatcgagtactttatagccaatggttctgagagggcagttgatgacattcttgatcattattctaagatctcggtatggattttctttgcttttatctatactttgtcatttgtttggtcttgaatgcaattgaattttctttcttgtgttgtgttcctgaaggttctttcaagttttgagtatgttgagcctaatggtaaagacgctggaataaatgtgaggaaaaaagtagaaaccattgtgggcatcataaatgacaaggagaaaataaaggccgtgagagataaagcagccagtaatcgtgataagtaagttgtcttggaaaagctttgagtgctcgccatgatttggattgtgcactcatctcaatactatttgttgcggttgaaggtacattggactatcatccacaggcataacatataaatcaagctcagcctcatttggtagcaactacagttcaagcgaacgttatgggagtttcagtggtacaaaggaagctgactcatacggtgatagttacaggg

SEQ ID NO: 7334 - DNA, 809 bp, Zea mays
atgcatcaattaaatcgtccatcaagtttgggccaaacagatccacctcatttgacttagcagttgttttgcctacaaaagacaaacagcaatgagattatgggaatcacaaatacatgtggagaaacaagtagttgtgttttacgtcgtacaaatttaatatagttcctaaactaacaaggtcctgggtggaaggacaagcccagggactcatgtgatctcccttgaactctgtttttgctctacttagtgaataggaaaactggcatcttttgtgtgcgttattataaaaagaaatcacaagcagacaactggcaatatacctgtcttagttaattttggaagaattgccacacgaatctaaattttgatccttttgcaagggtgcaaaaatggcaatatatgcatacttattactaaatcatacttgatgaggacctgtttcaggtgttaattcagttatgaaaaagaaatatgattcacatagttaatcatggtactgttcttaggatatcattcacttctctcccttttttctgaaaataaaacatcatgcatcatgttcatgattagaactggatagcagccaaacatacaagttcactttttgcataatactgcgactaagcacaaaataggtaaaagattttaccatttgatccacgaggatcgaagtcatcaaagtcgtcctcagtgttatttgtattagatgggggtctcaaagagctgggtgaactataatcctcattcctggtaattcaaacaaatcaacatcagtgatggatcaaaaatattaacacaatacagag

SEQ ID NO: 7335 - DNA, 741 bp, Zea mays
agcagtgggctgaattattaaacttgttcttagaacgctgttctgtatgctgtatagcttttggcttgcttccatcgtatgtatgaagtcatcgaacacggctcttaggctgtcttggatagatcgtgtagaataggagatacggaactaactatagatgagattgtttgacactgttttgcagagtaaattttgaaatagacgatacggtaagggatatgatagggatacgctggagataaccttgactgtacactgtagagtagataacgtccctagaaacaaagaaagtggtgtagagtagataacatcacaagcaccatattcttttactatctctaaaagtttttttgtcctctgtattttatttttctccaacaacaacgtacctatatgttaaatacttatatataagacatattttactatatgttggtagatttatgtatgtaaatatctgttataccttaaatatcttacttatacatattttaattttgcttaaaccgttgtctaaagtataaaaaaatagatagaagagaggagatagagtctctctctatatataaatttgaggatcatcttttatatttatatttagcggacactttagagaatatcattgaagcgtatggacgagaaaattttatctaaatataagttggggagatcgtttagagaaaataaaaaaagaccttcattctcgtcatcattcgcgtatgctcgcatttatgcatatac

SEQ ID NO: 7336 - DNA, 850 bp, Zea mays
atcaaggtccccgcgtacttacttggtaagggttttgcatgttctcgctccattcatgcacggctaatcgcttattcggtacggttatgattgacgaacgtaggagtaggttctttttgcggctgggactggcatacaaaattgttgtcaaaggaacttgtttgtttgctagtataaggaaacctcttttttttttttgaaaagtttctcttttttagaaaatgatatattttttaattgtttgtttgtgggttgttgcgagaactgacaaattgaccgagctaaacgacaatgcatggcagccgggtcgtgactcgtcttctagatgcgattccagccgtgttagtcgtagagaaatgccataggatagttagtagcggcgtaaaatgcaaatgcatgtccattgggtggtgcgggctcaccgtagaagacggttgtaaacttggactcgtgaatgcgtgtccattgggtggtgcgggttcaccgtagaaaacggttgcaaacttggactcgtgaacggcgattctgaagggtgaaaagcctggcgaccgattcactctaagaaaaaccatttcttgcttatgttctgaattaacggtcaggatcatctggttggggcacatatgttctttttttttgtttcagatgcgtcacgccatctctacggatttattgcctgtctttgttcgacgacgcgttaagactaatcgtgccagtaaatgttcgtccatttcaaactcaaataaaatttcaccgaaaatgacacacctgctagaattatgcagaccatttgtttttgggtgttgacttgtcaacaaaaagaacaccgtacttgccaaatccttgttgg

SEQ ID NO: 7337 - DNA, 798 bp, Zea mays
cttgcatgcctgcagtgcctgcccttgcaacagggcactcctgatcaaaacaagggcctgaggcaaaactttatctctaacagctaaaccaacgttttgaatagattttctgtcaaccattattgtgcaacaaagttccaatgcaagagcggtcatatgcaaatccatgtcactaccacaaattaaaaacaaatcagcatcactagtcatggcaagggcatatgcagaaggaagaatactacaaggaaaaaccttatgagggttgaaagttccgcgattattgtctcatacgaagaagagccaatctgaccaccatatgtgacaaccaaagaatttagagttcccaacgtcgcctgcctaagagctctgttggcctgttacataagagagagaaaatgaaggcattatcttgctctttgctatgcttttcagagaaaataaaaatcaaatgaaggcaacaaagatccatgcaactatgcaagtaccttgcgaaggaaagctgtgagctcagaaacaacatgatccaggacacacgagagatcaatacgtagaggtgaattcgcaataactgaaaatgcctgtcaagtgaaacagtttaggtaccacagaagaaaataagaaataaacaaaaattagacaacatattctcatgcataagcagacagaaattggtatgactaaattatgcaatattagatatccttaatcaagtgtttcagcatttgttctttaatattaaatatgccataaacaagcaatgcacgatgttaaaacctccaattaagtattggtatcaaa

SEQ ID NO: 7338 - DNA, 546 bp, Zea mays
tacccctcctggtatccccggcaggggcccggttcacgtccaccccccgcaggaacggcatctcgtggccgtggcgcgcggccgccggctgctgctgctgatccattgtcgtccctgcatgcatgcgcgcagtatctctgtcaggattagaggaacggcgtcatgcatgcggtgtctgctctttgaatcaattactcaccgaagaagagaccggggccgttccacttccaccactgcggcgcggggagggaggtgatgggcgcgacgctgatagctcgctgctgctgctgccgcggcggtggcgggggctcgacctcgaccggagccgcggtggcgacgccgaggccgaggccgaggctgaggctcagcccgagcccgagatggttgttcccgtactgctgctcctcgtctctcgcattaagcgccataatatccattgatggttgccactttgagctcggtttcccttgcagttgaaagagagagagagagagagagagatagcggtggatgaatcgatggagctgtcgatgtggtgtggcagtg

SEQ ID NO: 7339 - DNA, 843 bp, Zea mays
gactgcttgcatgcctgcagtgctttgctagattagtaaagattactcttaccaccagatgtggagcctaaccggttggtagggataccaatggtgctcctctgatagtccaagggtaccttttcaaagaacagttgcttgtaactgcaaccaaaagtctgatgggggtaccttttcaaaggaccattggttgcttgcttgatcaggttaacataattgcattgcatgcaaggaaactgtcacaggcagccaagactgtctgtctgtcagtaacctcagcatttctttatcatgccacatgagtttcatggatctttcgggagatacaaatctctgtcagaagaagagggcttggggtcttgggacacacatttccaagtcacctaaacctaacctagcagcacgacgacctagttcgctgtttcacatggttacagcatttgctactgtgacagtggaagtcagacttgcctgaagctgaagaaccccaagatttttattaagctgatgggatacctgtctcactctccgtgtacataccatgcctcttcatgttcattcagagcaactcccctatcaaaatatagctgcttcaaaataaattgtcattttagattagattgtgacaaacttcatagatttgactaggggatgcttgggatggctacaatgtggagttgcagtttataatattaatttaattagttttaaaaataattttaatctaaataataatcagaataatttatctaaatgtctttaaaaaacgtaatcatcacgattttctagagcacctaatgacttatttcaccaagttttttagagctagagctgtaccaaata

SEQ ID NO: 7340 - DNA, 830 bp, Zea mays
atcttgcatgcctgcaggatttctgataaccaaaaattttagggacggctaaaggattttaacactcagtttagcccaaatggacgttgactataagggaagcatgcaaagtgtgctgatatcgatgtgcactaaagagaaatggttggcaactgatatacgccactgtagctatgacagaatcagatatttacctctgtttgaagctcgcacattatctcgtacatgtctaacagaacaaagagtttctctggtgatcgtttactcatagcaatagcctctccaaaactgagtagtgtagccaaactgttctttgttattgcagcaaagcacttatccctcaacgattgactgcactcaaaaacttggtcgcaaagttggcgctccccagcaaaaagaagtttaacctgtctcaagcagaggcaaatgtcaccagagcaatgctataccataacagaagacctgagggagggagggaaattacttacagcaattcgcatgaaatgaatccaattccctattttagactccaaaatttcccacggcattttctgcacttcatctttgctaagtttttcaacgcccaagttcttcagacttgattctaaagctgaagaacgagcttcactgcacataaaagagaatatgcttcactaagtcactccatcaggtacaactgtactgcatctcttagagtcttagcagacacaacaggggcacacagaaacgagaaaagtttttgcatgccgataacaatagaaagtgcaaaactatcagtgtaaatcattgtacctatatatttctgagcattgctggtggcatccagcttg

SEQ ID NO: 7341 - DNA, 702 bp, Zea mays
atttctgtttgtcttgggccatcctggaagtcaagtgacagggagcgatgaacgttgtcattcctgaggaattttgtaatcgctttcgggagatagcttgctaggtatttgggttctgcatccctgtagaaccatatcttcaccttcctgagctgcctaatgtgacgcatgagtggcggaaatccttggcctctgcgggtgaagaaccccgacaccgtctccaggttgctttccttgattgcctttggtactagtgcatctggataagccctaattggtagtccgttgaagttgtcaataagctcaaattttccgattaggtgttttatgcatggcagttccaagacttggataggcaccagaactgccgccctgccattgacctcccccaactcgagtgtctccaagcactgcaaattagacattgagcttggaacttgagtgatgatatctggcaggaggctcagatatttgagaagcttcagtttcttgcatatctcctctagctggtctggctgtagaccgttgtatgacgccagatccagcactcggagctgctcgcattcagcaatcctgctggcctgttgctgcccccaggacacagccagagttcgcaggcgtggtggtacagaaccgttggtgatgaccaagggttggggttcaccttcttcttcctcggcaggatgtaaacaaagccggcgg

SEQ ID NO: 7342 - DNA, 808 bp, Zea mays
cgttcccggggaccctctaaagccgacctgcagaaaaatatgataggtcaatgtgataccaaacaagtatatttgcaaaaaaaaagacggtatctacctgggcatggttgagaagcttacggtatgtgacaatcaactcacgtcccagttgacctccactttttgtgttgacaaaaacaatcaccggacaagtaggtatctgagatgcatgctccactggagactctggcacgaaaatataggttgggatatagaactctttcaccatgttatttttctcaacatcgttctccatttaagcctgcaacctgcatcattaatgctaatgttagttagatggttatacactgtaaggctagacattctatgttctttcactggcaaagggcaaacgcagcacagcacagcatttatttattttttggcaaagggtgtgactgtgactccattccattccattccaagtgaaacggcttcaaatgggatcataaccaaaactaggtgaagctgctttagaaagaggcttgctcatgacgcccatcccttcttcaagtccacggaaacagatgtcagtcgctatcggtgtgacataaggcctactactcgtaccaattatgtaaaacagaattagtgccgctgttcgcttgccaacaaatcacctcacctgccagcatcctagaacaatctaaaacaggtagccgttacttttacccttttcttaaggataagtctgacggcgaatcgtttgttttgagacaaggaccgaataatttgaaaccaaaccattcaaagtgatcaaactgaagtt

SEQ ID NO: 7343 - DNA, 1231 bp, Zea mays
aagttagttgagctcctgctcttagcacttgggaagatgcttcagggtttcctctagtctcattggatgctgcctgttgctgggatgacaggttggtgcaccaagccaagaggcatgttcatgttgctagcgttctccgccgctgcactgccgtcacagtttggctccaataagcgcacaagcgatagaaagatctccattctggttacgtcccggttcgcctgcatggaacagcgtcatctcattcctttggatttccattctggttactgtttattacttcagattttgatcttctagttactgttttttacttcagattttgatctgaaagaatcctgattattaaatttagctgcattacctcaacagtgaaccgtgcccagattttacttttgcgcatttccatcacacccctcaagatagtcagtcctagtcctttgatgaaatcagctatctccaagaagattcctctatcctcgcaaagcatctgtagaggcaaccaagtcatcacaatcacatgcgttctaggtgaaatgtagtaccgttaccgtaaacaattagtagtagaatagtcaatacctccacaagcatttgacgaggtcggtcaagatcctcgacaatgatcggacatgtcatagactgagagccgacatcaaaagcccaggtagccccaccttcgaagtagtctttccaaagggggccattttcgctaccaagtatctgcttgaagaagactatttgtatcaaggacattttccaactacggaggattaagtaaaatattttgagatcccccctcatcaggtaaccatatcatcaatattttttcttagtcatatcacaacccaaaaggccaaaacttgaccgtaaagaatgtgcataccttagactcagtagagtccttgaacttgtctgcatttttcgtcacactttgtaagaaaagcatgtgcttaactgtcttctccaacaaaccatcaatactacactattgacattgatgtgcaattgttagtacactatcgtgtagattattcgtagatcagatatacgattcaaactttgaaaattatcattagagagaattcattagagcatacctttgccccattcggtacaagctcacgaagctctttaatacggtcctgtatcagctgccggtccttaggtcgtgcttaaggctttctccttgtcgggatctcttgcgatttgccttgcttgcacatcaaga

SEQ ID NO: 7344 - DNA, 824 bp, Zea mays
actgaaaagcaacaaatgacccacaagtttgtttttttttcttaaagaaaagatccactgtgagatgagaagtgggtttgtaaataccaagcagccacttctttatcgggtcattatcctagaatccttgggaaatctttgtttttcagtgctacaacttacaacccctctgatcgactggtggcgtaagagtggcttaattgtaaaggtcattactgaaccatttctgccttctctttaatataagatactcgctctcatgcgtgttccaaaaaaaaacagctacttgtggtgcacaaagttagcatgtcacataagattgaaactttgacaaagatgctcatggatgagaacagcagcagatttagtatgatttagtatttgtagtgaactaaacaccacgaaagatggacaatcctaagtcacgccaaagttgtaaacaatgagcccacaccacctagtgcttaaaaggaacactagaggatagactacatttgacaaggtaacatgcttttcagcaaacatttcttatgaaatgagttcagctaacattaccataacaacaatcaaacccacgcttaatgtcttaaaacagtgattaattgactagcaagaatacattcgtagatcatcaccacaacgatgattgtttcaacaaaacctgcacggaagaagagtgcattggaatatttgctatcaatctaagaaaatatttatctaacttcactgctgaactacactaacacagtccaaatgatctgaaatggttgtctgagttagagcccaagagcttgttcattccaacttcctaattcttacttgca

SEQ ID NO: 7345 - DNA, 920 bp, Zea mays
agtacgagctccgtgcttagttgcaggtacttatcatttaccaccacatatcaaaccatagttgcttgttaagttttctcattttctatgattttaaactagaggaatttaatattttcaacgatcatgtatcagtaaagcagtaatcctccaaccaggcaaatcgttttttggtagtccaaaccaatttcttatacccccccccccccccccccaaaaaaaagaaaaaaagaaaagaggcactgaagacagtcaactatgaggatcattgaccatgcctaacattttgctgagtcagtgttcaaagttattgtagcaaccaccctactctcagtattaatagcataaaaatcatccaaatacgcattgaccagcgatagtaacctgtctactggagaccaatctgaacttacatggtacccaaggaccatgtcattgcaaaccacctcattttgattgataaatcaaaagtaacaaaagaaaaaagaaaaacaaattcagaagcagacccctctgccatccaattccagatcaccctttttaaaaattctggccaaatagtagctgcttttttaccatgtggtcacaatccaaactcccaaattgcacagaaccacctttgtgcagaacacagaccgacaagaacacccaccatgcagcaaggcggccatcgcactcgggccgtaatcctgcaccaagaaccctgcctaaaaggccgggagcaaagcgacgtccccgcactagcaccagcagccacactcacactgtctcatcaaatcacggaagcccagccaaatccccagaccctgggatatcaagacaatagcacctaggaaaggcgccactttcttggtaggcagggcccggttttcccaaacacttcttaagcccccccatgggcttaaccctggatcttgacc

SEQ ID NO: 7346 - DNA, 801 bp, Zea mays
tgccaacaggtgtctcctctgggatgaagaggaacaagtgtccatggatgcaccagaattttttttaaatatatttctttcaaagcaatgacgggtacctgtggaaaggctagctaatcaaaccggtaactgatcggtttgatgactgttagagcacttgttgacgagatattacagattacactgaatgactgagcatgttgttgggcggattcaatgaacacgcaacggctttccgtattaaaatgaacaacaaacgtaacatcacagggtttttttttaaaaaaaaaatcttgtcgtgctaatgtaacctcgattaattgtgttgagcctaccggatttttgaatgcgttagccactactactagtctatctactactataacgttcgtccagctgctagctacgtgcgtactactgtaggcgattaggctgggggcagcatctccataattattcattcaatgtgtagtccaatccatatccgcctcctcaagaacaaggagtattgattatttccagtagcgtcagttacgtggtctacgtccctgctgaaatagaatacgttgctcttgccttgttgcctagtcagtctagtgacatatggatcgccgcttgctcaatgatgctctcagttctttattacattttccgttgagaatggtgctgtgcgcattttaattttattttgttttccttatcgcaacggtattttatcgtgcttagtgcattataccaggtgaattgtacacttgaaaaaaaaaggttcagcggatgggccccttttggggggcccttttt

SEQ ID NO: 7347 - DNA, 703 bp, Zea mays
aaagctcaccaagaaataaagaagtgcaaaaattattgggaatacatcaatttgataataacttatattagattcataacatgccaatctaaatcaaaaaggaaaattatggcacttaagcagaaactgggtgcaggataggaactagttctaattgcaggcaatgtagagtttgtgcatgcatacaaataacacagcaaggaattatgaaataatgcagcattccaatttacaaattgagtcgtcagcaaaaatgaactgttaacatttccctctgtatgtctgtggaataacacttcaaagcaacttgctaaactacaacagttgatggtacaatgattagcaagtagtaactgataaagagctggtcagactatgtcaaaagtagggaaaccagttgcagccccttcagtatagatgtcacatgtatgccatcataaagatttggttgcaacttgcacgtacccctttctttctaagttgatttgttgaatcaaattgtcgaataatctgcttcagaagacctctcttaggctccaacaatattctccttccagcttcaaccttagatatattgacaagtgtggaggcaacgtactcaaaaatgtcttcctctgctttttttgtaaaagaaaaaaggttgtttacatgtcaactgaatatttcagcgatgactcaagacaacaaccacagaatgacagat

SEQ ID NO: 7348 - DNA, 792 bp, Zea mays
gctcgcctgcagccttcgcttgaaaagttccttctgtgttactccataaaatgtgcagccctttaaaattaatatgtatacacggtggtttcatcttcccttccatgagtggaatggttatggctatgtacattacatagaatttggtacgtacatgatcatcatctgcatgactgcattttgtgtatggcgtttgtcagtttgcaatgacagggtgttgatttattctgtgccgtaagcattctatgtctcagctttcccatggaactcaatcaaaacagaacatacgatttcagatagactgggtgtaactgccatttccaggccatgttatagggtaacttaaattaactgtcctgtcagatttgtacactcgttcaatcctctaaaagctgtaaagcgtatatgttactggctttaggaatagtcgccatttgcgtcccgtgttttacatagtttactttcttttgttttctaggactattttgtaggtttcttcgaaggtattggttgaagcaaggtaaaagtgttgatatgtgagtcagtagtgattctggtgtgctatctcacgggatcagcttgcggcatataacgatgattgcatcatggataatcttctatattctgattcatatgcactctacaagttgataaaaaaactaaaggaacccttgactgccagtgttgttccagccttttaaaccctccttacagatctctaatatcattctcaatgtatagtttttggaaagtttcatatattaattagagtgtcacgttagatttttggac

SEQ ID NO: 7349 - DNA, 829 bp, Zea mays
aatggggcaaatgctgtggcagcggcttgaaggaactggggtttccttttcggttgcttcggttctggaaagagaagcaagcttgcttaggaatggtgtaacgaggcactaggtggcgccaagtcttcttgcttcaaggtggtgatgcacatgctcatctcagtctagcagtagcgagaaacatacattgattggttcaacccaaacaaacgtaatgttgaacaatctcgttgtaaccctactcatttgtcgttgcggtgttaaattattttaaccaaaatatggtgaatgtactaggtgggcggaccaaatcatttaacgtctctttctattattacattgcgaggtttatttggaatgcatacatgctatttttaatacccaactatatattgttaaatatttagactttttatgatgtactttaattcagaaataagacattacatacaacatggcacaaacggacatgagcaacccattcgtcacatatgttgatctactatcgagtaccgaacaagataataacagattctatccacaaatccacaacacatatagccaaaacatattagagataagtttagactagagcaattagcagcccctgagatgggaaaaggtacacccccacccctagcatatgacgcgcataatgatccagtcagagacctgtacacgataagaaagattaacaagcttatcttagctgggttggtggaccaaaaaatggaaaaagattcattagaaaataaatcccctctcatttataatttaaaataaccgagaagaatcctttcccattttctattgtctaccaaaaccagcc

SEQ ID NO: 7350 - DNA, 861 bp, Zea mays
cagcttgcatgcctgcagctgggaggaggagagcgccctgtcgatgctgtgcaggacggcgaggaggtagtggagcgtgttgaggcgcacgtagagccgctgcgtgccgcggctggtggcggggcgcaccgcgtggtctcgctctcctcgtcccgaccggctcgcctccagcctgggcttcttgctgctcgtgacaatgtcgatcctgccgcagtcgagagcctccaggtcgcccacctggcacggcggcgccgccttcttccagagctgcacgagcttggagtcctggttgcaccgcgtcaatgtcggcagaggtggaacgtagctgtccttggaccctgcatttcatcgtggtttgggttgtcagtgtcgtcactcatgatagagatgcatgcatgtctgtaatagcatcatagcatattagcatgccaagtagttaccgcaccacacgaggcaagcagcatagcgtactggtggacgaggtgatcgatgccgtcaacaaggcgttgcagcagctcctctttgcaggccgacgccacctggatctccagcatctcatccacggtgaccttggccagcttcatcagatccaccgcagactgtgcgtacggctcggccttggacctcgggttccaggtctctgcctcctgggcccttctcaagcactcgtcccctaccttgagccgctcgtccatccagcccttgaccaggccaaagatgatggagtccacgtcgtagggggtcatcggcggctggtctggcggcgggtcgtcctcgctggccatctgtagcaaccacttgtccagcttaaaggcccgggtgcaggacgcgcacagtctcgctgctcaggccgcacgccgc

SEQ ID NO: 7351 - DNA, 885 bp, Zea mays
  unsure (1)..(885): unsure at all n locations
gctggagttggaagcaggccatctaaaacattaatgttcctggaaggctttcacaagccactgggatgcacggtatgcatgtcgtctgctgctagttcctttcctttcctttcctgtctaatttgtcatgctcatgcatggtgacccatgcagatattgctaaggggagcaaatactcaagaactgaagaaaatcaagcaggtcatgaactacacagtgtttgcagcgtaccgcctcgttcttgagacatccttcttcgaagatcagagactaatcttgaacaataaggattcttccaaagaagaagtttctgtcgctaggaaggccggaccatcgtcactaggatcagtacaggaaactactgattccaatgctctaaatccactcgacaagggcttccctaatcaagcactactcccttctgaaggactagtagtatcagcagtcccagaatcacccagaagattcattgatatactccgttatcataatatttatttgccggtcacttcttctcaagaggcaactgatcatcagatacaagacagtatccatatcagcccaaacgttggagtaccaattggttctgttgagagtgtggatcatttaagcgatccccaggaacaagcatcctctgaaaccaatcagcaaatggcattggacggcccttcggttagtgaaaaacatgagcagtcattggaaaatattaaaacatctgatacagatgaggtggacgatgtgttggagtctcagagcatacttattttgctgtctagccagtgtatcacaaaacaggttatctgcgagcagagccgcctattccgtataagatactacgggaattnttgatgttttctttgggccgctatttgcaagacattttgc

SEQ ID NO: 7352 - DNA, 819 bp, Zea mays
tggccatttgccgctattgccttttcagctggtgtacaatctacaagttggtgcagccggcagtcccacacataaagttccagtagaagatcctgatagagccagtttacattaaggatatcatccacagagcttgattccctatttcgatcaacagtctttgctagagaatcctggaatgatgataaaggcaagccatgaaataatgattgccagaaatgcagagtaaatcaaatcagtgcgactgatggaaggttcatctctgaaagagtttaccatgaactcagccttctctttaatcaacatctcttcaagttgggaaaggtctttaacaggaaactgatccttgagcttctgtagtgcgcttgtgacttccgagaaaagtgtaactcctgtagcaagaaccttaaacatgtgcagcagaggcatattaggctccagcattatggatgttcacaaaagaagcatgagatgggaccaacaattgagaacgaacgatacatacatttcgtacctcttgcccgtaccactcgtgcatatcggaattgtgaaactcaagagtaggctgtggtttgcaggcattgtaaatttcgactgaggaatactggaacattgcaactttggagcccaacctgaagttgacacatcccaaataaatgaacagaaaaggtagtacaatacattggaagcaaaacaatttatgaaatgcagctgatgttttgagcttacccaaaaaagcgcagacaatcggtattgagtgaatgcccgcatattgacagccttctagcgggtgagtggcttgaaaaactgatttcaagg

SEQ ID NO: 7353 - DNA, 869 bp, Zea mays
aaactcctaagttgattcgaaaatccaacgctctccgcaactggcaggtaagcgtgcactgtaaataacgaggttccttcttgcatctcttctttcagaatccttgcccgcctcttaccaagaactgcataagttgcacctaactgctcggttggcgtggtcaactcacagaaatacatagcctcaacaagccttggcttgttctgaagaacagctgctctgcatgcttctttaaccgcagtgattacttgaccgctgaagacattgtattgatcagattggttggcagcatcagagccatcagcaaatatgtaaggctcaacaataaacgcaagaccccacataggttcatcacataaaggcccagcattagtggcaatctggaatcctgagacaatgctgttccttagtgttgtagactctatatgcaatgattcaggagcatccgttgcatattcaccattgtcaagattgttgttatttttggtatcacaatccctcacaaaccccaatttctcagagacatgagctggaccactcacaagtacaccttgccttccatcctggacagttactgcaccaccacttgattttgattcagccaaaagaaggatatttggaccaacctgccaaggacctagtgaccagattctttcaaggtgtccaagccatgtctttctatacctgtcgagtttttctttatcaacttgcttagatattgcttctaattcactgtctatggcatcgatcatccgctgtcttagagttgcagcggaatcaccatcttcctgagaaaggcgaggatccaaaacaccatccctttttgctgttttcccatcaattatttgaccaagcaactgttcactttc

SEQ ID NO: 7354 - DNA, 789 bp, Zea mays
atggggtgatagcatgcgcattctagcatacacatgcccttggcctggtaatgcttggattttttttctcacacaaaagaatatactggtttgttgaactatgtgatgtcattttctacttttctgttttttagccgatcatccgaaggctaatgaatattactctgacccaagattagcagcatatgctgtaccctatgcacctatcctatcgtggtatcactaatccttctaaatttgatatcatcttatctgattcagcttgttactttatttaatttggctccttgttaacagtacggatgctgcaaaaaattccctgaggagagaggttgaaatcttaaaatcgaagcctcattggtccaaagcttacttctatttgtgggatgaggtgcgttattttaccttttctgctatgtcctgatttcaggggacaccaatgtagatgcatgtagggagaaacttgttgcagttacggaaatggtttccaatatctactcttgcaatcgaagatatggagttactctttgggttctccttttagttttattatgctcgtccagtggacatgctcctgcaacagaaagttgaatttttcactcagcttgtggtgttcctcctggtcccatatcgactttcagttcctagcatgacctgcttaactctatggtattaaattttggaagttggaactaatatcattgaccgcaattagccattggaggctataccatttctcaatatacttttattctttctggaaaaatatatgatggtttacgtgtttct

SEQ ID NO: 7355 - DNA, 742 bp, Zea mays
ttttacagtttggccactgatggatataaaacttcagaaccttacaaacgtctgccaaaaaatgccatctctaatatcagaatttagtaaataaactactcacttatttccaaattacaaaaaatggtttttttacatatattatttttagtatatatctataaatatactgtatataaaagtgtatagtaaaaactataaatctagaaaagtcaaaacatcctataaattagaatagagggagtaaataagaattgcaatgttaaagaatgcctacggcatgtaaacctttgtagatgtttagaagtacataaaaacatgaccagttggtcccacaatattcacgcaattctatcattttttcctgaaaaagcaaatttgtagttccaagaatttaatgatgaactgctgttttgaacatttctaattcaaagagtttagcttttatgtctgttcttgaacatacaaccatattgatgttccagacaatatcttgccttcattattgtgatttgacattgtgtttactttttttttttctggtcatatcaatgaaattgataatagtaaccggtgctggttgtgcaggcccaccaaaaagcaaacgcactagcaaatgcgccgaccaagcggaagagccctgatcatgcagccggaacatccacaccatctttggcgccaagcagcaagaagcagaagagcaccttaacctgcacggtgtgtggcatcaccgcaaacagcc

SEQ ID NO: 7356 - DNA, 859 bp, Zea mays
cttgcatgcctgcagctgcctgctcttcttcagcttccttagcaatctccccatcctcagctggctcaatgatgcatgccgtggatgcagtgttcttcgtttgtgacacttccaacgacggggctgattctgcttcttcgttggcagcggtttttgcttgtgccgccgccgattctgcctccacgttgcctttggtaggctttgagccgatgttttcttgggccccatcagccccggcggtggcaaggacacacaagccattgtttcctccggcagcagcgagtgtgatcttgcgcttgtgcttcttcccagacaggtgagaccgcatgacgatctcagatggtgcctttgcattgcagctcaggcagacgaggaagccatccacccgccgcagagggtgcaacacactgtctacttccatggccagtgagtcagaatcacagacattgttgacctgagccccagcagaagttgcactgcctttcatcatttccgttccaggagttgcagtaatgtcgtccccagtggcgacgcgttcctttgctgctgccacagtagtttcttgcagcccaatgtcatcaccgtgctttggttgcaacgacttattcgccagtagcgctttcacctttgctgccatgtcgtcagagatgacaaccgtgtgatttgtgtctatcggctgtgcttcggcttcttcctttccacctatggctatggagccgttgacggaggcatcagatgagctggtactcgccttcttctcgtgctttttccctgacaagtgttgacgcatgccattcatcgatgggggctttacgtcacacagctcgcagagcagaaagcctttcagcggcgcacggtg

SEQ ID NO: 7357 - DNA, 825 bp, Zea mays
catgcctgcaggatatagtttagtgtttgttttgtttttctttggcaattacgctttaataagcactatttgggtttggggaggggaggcgcgcgcatgcatgtgcgcatgacagtttttcatcaggaagcgttacatcaaattcaagagacagcctctatcgtcatgaacttttcgtacgtactagctttcgtgcatggcaatttggaactactggttttcccggcccagctgaaaccctcggaatcatggatggaatcgtcacagtagcacaacgcgatgccccagctgaagaacaatgcagaagtagatccggtgacagaaacactggaacagaatcacatatatatataatatgccatacttccgcatctatcatcacatatatatatgctccctaatttgcagtatatattctcagcgcatcagaaactttgacacatggacacttaacaatggggcataaaaaaacacaaatatctggggaccaatctgtgctgctgggcccaacaaccttctcttttagcaagcaattaaaggactagtgtttggggatttgtttcatttgtctcctctcctccgatgagcttcactttggttacaaatcttgtactagtttctaaaaccatggttttatattctcaaaaaaatgtttttttttgttttagaaactccgctcgtgacctttccacgatcatgtcaactgttcacgcgcaccaccgccttgggctcgtagcggcgggggctagaagcgatcatgcatgtcgtcgccggggtccacggcgactcgtgctcaccaatgtccatgccaaagcaaactgtgat

SEQ ID NO: 7358 - DNA, 811 bp, Zea mays
aatgaattcaggagttggtttgtactttgtacagtagtaactgctatcgggtaatatactaatctattgcacagaaagcagttgccgttgactacagggttcagaagattaatagccatctaataaatatacaaaaaggatagacccaatgctagaggctctcacttaaatggggcctagggaaagaataagccgaggcaagctttccctcgcaaatacggaggaagctttgaatccatggcctggtgacttggtgagacaactctcaccactgcacaagtccacctaataaatataactaattaatatgttgacctaccattgatgaaagactgactgttcagaaaacgttatgatgggaaaatgtgtcaaattccaaaatgtatatcttatttgtggtgaaacaaagcatcttaatatgaagtgtgacaattaattattctggttcaaaggaagaatcgtgaatacattaagaaaaggctcacttgatgtggtgtggcagctcagtttccttggtacacgctctgatacatagaaagacagtcataagaatccttatgatccatctcacagattgctccaggtatgccagtgggatggataatacaatttggctgacagctatttcatcggaacagtatccgatatcctccgaaggaagaacaaaagaacaaaaggcattgctcaattttatagagtagtcaatccattcagttctatcaagagaataagttggaccagagacagaatctagtgtaagtgaagctttggtactgtcattttgccaatggaacatctgaatcataaatgc

SEQ ID NO: 7359 - DNA, 785 bp, Zea mays
aacttgttacaatgccaggacataataatttgtgctattaactatatcgattctacatggtacatgaattactgtgtttgtacatgtgaatattcattgccttggatcaatcataggctcagggctatcacaagaagttccatcttcagttatacctatgaaaattaatgttccttgcttactatctgtgcaaagacctagctgaaaaaccttttctcagcacataagaattgtcacttcacttatttcacattactaggtagctgatttactttcctatatttggatgcaaagctccatgtgttctgtcctgacatgcatagtatattattgtaaatatatgctatcttagcaatttctaattgtgcatatggaaaaacattttttttgcatcttatctgtggtagtacggtagtacttgatcagatgccttgccatccaacacaactgattatttatctcacgactacaatgtattttttctggaactattggatgcaagactccttgtgacctatactgaccagtacattattgttctcacaaaactaatcatctcatgctgaaccttaaatccttaattgatgggagagcttgtatagctaaattcagtagcttattgcactttcattattatcatgaaataaatacctaactaacaatctgtttttttatcggttgcacataagatgaaacaacattgatgagtaccagattagatatacaagctccaaggattgattatgttcatccaacatggtttgaagcagggaaacctgtcaatc

SEQ ID NO: 7360 - DNA, 772 bp, Zea mays
acaaccgacaagggcgggcggcgacgctccaggcgagcacgtggcggcgcgcgcgggtggaagccgcggccggtggcgacggcgggtggcaggaaccctagctcagtaccatgttagagaagcaaaaaagaagcacatctattccataggacccaaagggcaaaagtacatgaggcaactttacagaggaaactctagagaaaacacactagaagaggaactgtatatatacactaacaaaagtcatgaaaagaacaaacattaaacttttggcaattacttgttctatcctatgacgaaaatactaatttctagacattttgtgcatgaaatattttttgaacaaacgcaggagagttgtgtgtcatttcataaagaaaaaaatacaaagaagggcaggccaagacttgctggccccaattacagaccgcagctaaggacagcgcgccacacacaaggtagagaacgaccactaacttcaccgaattacggtggagtccccaaggggagctgacgcagcaggaggtcttggaggtagagcacgagccgctgtcctctgctttctagctttctttgagattagggggatcaaatttgcatgaaatatgaccgaatgaaataaattgagcattgaagttatttagcactcaaactcatttaagtgtttcttcaacttgatcagaatagagtgaagtccaagagtgttcttgtaaaatttggtcaactacacatggttattgaaacaatatttttgattttgcaacctactaac

SEQ ID NO: 7361 - DNA, 851 bp, Zea mays
tttgcatgcctgcagacgctgaggctaccggatgactccatgcacggctacgacctcagctttgggcctttggcacgcttgatatgggcccagcggggatccctcctccttggtcgaggacaatcaccaattcttcccggtgtaataatttggggagtaaaactgatggacggttcttagtgttaactgtgtctatgcattatcacgagagtaaaaaattagtataaaatatagataagacccacaaacatcactattttatgtaaaatccgtgataaaatatcaccatgaattagtgcattacgaccgtgcgttacgacgacatacaaaatattcaataaaatattagtgcataacgattaccatattcctgctccatctctattatttaccgaaacaaattatttatttgtttacacaatttttttcatcattaccgcttctaagaataaacatgtctcacacaaaaccagttcaatcatcgccatcacttctatatatatatatagatagacaagttttgtgtgctctgtactataaaattcaatgacttgctctacttattttctagcaagacatgccatagggttaaatacaagtatgtagccttattgttaatcgtcacaatttgtattgcagtagcggattactgattctcatttgccatgttcacaagttcttactgcaaaagcatttctaatgtcacacaagatacaaaagccagagataaatcttgatatagctataaggatttcacgagatcttactagtggtacagactacaactatcttatcattgtcggaatttcaagtgagtttttcaggaaggactgagcatcaacagctcggag

SEQ ID NO: 7362 - DNA, 529 bp, Zea mays
acctggcgagcccccggagcttgggttggaggaagctcttggccttcttactcgtgagcgcgtaccccaccacgacctccctcgcgggcgccggcaccaccgcctcctccgcgacagccggcgccaccgcctcagggtccacctgcccctccgtccccacgcacacgcccgacaccatcgcagcgtgccgaggcccaatagcggcgagacaaacccgggccggccggccggagagagagcggagaggggagggcgatcgagatcaaggccaggcgggcggcggcgagagatcgggaatgccgggaagggaagggagcgcggccggagccctaagcctcgggagcggagcggtgcggccgtgcggggacaggtggtgtgtgcgggcagggcaaggtgaggcggagaggagaggagagtggaagagaggtgggggcgcctgcgtatttgtaggcggaggatgggagcaactttgcctctgggtcccttggaaaaaagtttctgccagattacggtcttgtccttgtacccc

SEQ ID NO: 7363 - DNA, 743 bp, Zea mays
acctggcgagcccccggagcttgggttggaggaagctcttggccttcttactcgtgagcgcgtaccccaccacgacctccctcgcgggcgccggcaccaccgcctcctccgcgacagccggcgccaccgcctcagggtccacctgcccctccgtccccacgcacacgcccgacaccatcgcagcgtgccgaggcccaatagcggcgagacaaacccgggccggccggccggagagagagcggagaggggagggcgatcgagatcaaggccaggcgggcggcggcgagagatcgggaatgccgggaagggaagggagcgcggccggagccctaagcctcgggagcggagcggtgcggccgtgcggggacaggtggtgtgtgcgggcagggcaaggtgaggcggagaggagaggagagtggaagagaggtgggggcgcctgcgtatttgtaggcggaggatgggagcaactttgcctctgggtcccttggaaaaaagtttctgccagattacggtcttgtccttgtacccccttgtcttcagttttcgtttcctttttgcgctgctgaacaaatattatcctgaaatccgtatggcttctattacagaaatactctccccgatcgtaagtgcggatgcaaagcgtagtacacccttgaaaagaatgtagcttatctaattagacaaaaactattgtgcaattagaatttctcgtacaccttatcatatacatgtacttattattt

SEQ ID NO: 7364 - DNA, 865 bp, Zea mays
gcagaactaattctcacaaaaaatggaagtggtctagtggagcacaactagatgcgactcaaacacatttgctctaggtcacacgagcgcggagcgaactgaaagaaacagcaggtagaacctacagagaagtattctggggaatgggcatatataccttggcggcgcgggtgaggcgatcaccgctctcgccgacggagatgttgagcacgagcttctggaccttcatctcccgcatcgggttcgactgcttcttctccgacgcctgaaatcgcgggcaccaccatcacacatcgtcagaatcgcacacgcgcgaggaacgaatgattcggtgggcagaaaaaaaaacacagagctgaatggcgctaagtgcaaagcattatccgtgcggggacctcaccatgggatgatctggtagacaacggcgaaggaggtgagagagtacagcagcgcggggcgagggctgaggcggcggcggaagaaaaagcttgtaaggtaagaaaaccctaaatcgtactatgcttgcttgtgtacaattacgtacgtaaccctgatccgcttgaaaacgtcgcgttaaaaaaagttcaaaaatttccgttgccgggactcgaacccgggtctttcgggtgagagccgaatatcctgaccagctagactacaacggatttgttattcacacaaatgtagtattaagtattcagtttattttaggttggtaaatggctaattcactggattactgcaaaaaaatgtttatgtgcgtcaaaaaccaaaaaaaggtgaaagttttgattactaaaaggagtgccaggagttccaaaaaaaatgtaggccattttaaacttttttattttgccattggcac

SEQ ID NO: 7365 - DNA, 874 bp, Zea mays
cccggggaccctctagagtctacctgcagaactaagtggtttattagcattaggtatatagcttggattcaaatagttttggaaagagccgatgcattaaagaaactgttggccctgctctcatgggaactagtacagaggcatcatagtcatctactcatctgtattttagtcttcatggactaggaaggatggagatggcttccactggatgatttttatttattttagtaaaacatggcagctgttagctatatgactgagatagattatcaaatcatgtcaatgtaatttctaagtttctggtgtccctatgttcgacaatgttttcttgttgtgatactgagtttctcttttcccttatttttcttttcaggccactcatatcacttgcttatcctctgtaagtatctcctttgtccttagttgactgtctcagtattttcctcttgatactatgtccaggggctaagccaggatttgttttttttttgggagggggacaaatcagattgagggggctgttagggaggtattttagcttatttgcatgatgattagctaaaataattagtggctcctatagaattacaggagcattggggggacattacagagagcctggagcaatgttacagtggctcctaactatgtcccaacctctgcctccctgtcttcgcccctgactatgtcactggcaggagtaaataggaaattggagttgtggctaaagactccggagtccaaaggttttatacttagtagaactaaaatcaaatatatgagatgtgactccggtactactagacatgaggaaagagatgttagttgggtactttggtgtccaagaagaatattttcggtattaatgaac

SEQ ID NO: 7366 - DNA, 875 bp, Zea mays
tgacagcacatcatcagatttacctagcttctcatttcttggaacataccatatgttcactattcggcggttcacaaacattggccgcacaaaatggtcgtaaacataagcagcaccattgaaccaaggtaagaccaaccagcagttaaagaacagttttgcatatgaccaaaatggaagcctgcaaataaagatctaaagtgagcatatctagtttccttttcaccaacttgatgcaccaaacacagctatatccatgcaccaccaataatgtttgcaaataatcacaaaggccacaaaaaccataaaaatgaacacattgggacatgaccagaaccgtaatttaccactcgataattggagcaaaagttagctcaaacaaagtgacaaatgagtacaacacccagtaagtgagccactgctgatcatctacaggattttttgtctctattgctctaacagaagcatatctgcaaagttgccaaaacagaaaatgattagaaatataacaatagtgctcacatagtatcatcatcaacaacaacatcaaaaaattattttagtcacaagcaagttggagtaggctagagttgaaacccaacataaaatgcaagtcaaggttcaggtatatggataattgtttttgatgcactcatattcaaggttatattctatcctttcaagtcttctgtctctttttatatcaacttcggctttctcctacctctctttcccattactatcgcgccttagcatcctactacacaccggtgcctctaaaggttttcgttggacatattaaactatttcaaccgaggttgaacaagtttatttccaattggtgctacccttaacctatcacatatatcatcatt

SEQ ID NO: 7367 - DNA, 833 bp, Zea mays
aagacaaaggcatgcggtgaggttgactgccagagccaactactgtggtaacgacccgacccgaccgtacgtctctgggcaacgtacgtaggtgcagcgagacgacaggcagcaggcatcacaacaccacttcacttcacttcaacgccggccgggaagaggtgagctgggcgggggttttatttaccggtgtcgcagacgacgctagatataacaattaataaacacaagtcatagtcgctgccctgacctggtcctgctcgtgctcctgctgcccctggagctatagatgtccaaatgggccacccggcccggacccggcccgaacccgttttggtccggtataaatagggccgggccaggcacggcccgttgatgcttcgggccgggtcgtgctggcccacgtgcctagggacatgcccaaacccggcacgcacaggaaaaaatcgtgccgggccggcccgttggcccggtgggcctcaacgtaccgtgccgccaccggcccgaaccaatagtaaagcagtatataaatacatacatataacagaattaatcatacataataacatattatttacatatattaagacaacaaaattcattgacatccctaatcctcgcacgatccacaaagcactgagcaacctcagtataggtttcctcatcaagtccattgtcatccccaactctgcgctccttcactgcacgaagaatgattggtgaaaccgactcgaagtcaccagatttgagggacccactaaccaggttcttgaaaaaccccttcttgctgaagcccagagcataaaacaatggattccggtcattcaccccgc

SEQ ID NO: 7368 - DNA, 809 bp, Zea mays
cagggagtctaggaacagcgcaagcaaggaatcagacggagatgcttccccttgttgtggacgagaagcaagaaaaggtttagcaatggtgctaggccttctcttcacttgttgaagagagaattatatatgtactcgtgcgtgcgtgtgtggtgagggtagtaaactggaacttcgtacaagcatcgtttcctccttccatttgtgacactattcgccagcatcagaatgtgaaattgaattaagcgcacgccaggaggattgggcttggatgctggggcttcactcccggcaactcgccggcgtgggcacaggactcccaggccaccggcggccgactctccgtgctccactcgtcgggaactgtgaggaagtgcttgctcatgaacttcctgaacctcttcttgtaatccctgggggaaatcaccgttggcgattcattcttgggcaccaccagagacgctttcaccatcgtctccagctgcttgtcccatgtatactgcctcaggtagtcgatgatgccgaataccagctcacgcttctgcctgtccactccaaccagcaaagagtagtccatgacattgatggactgcaagcacaagcacaggaatggatactgttagaaaaagacgtgtcttggattcctatgaactatgatctatctatctatgtatgaactatggataccgtgagaaaagacgtgtcgttccagattgcccgctccaagagatgctttgctctttcaccaatatagattggagaaacacgcatgtcatccacaaagttctggtccaagtagacagtgccag

SEQ ID NO: 7369 - DNA, 745 bp, Zea mays
aagtgttgaattgctgagtaggcatcaatattgaatctcaaaggacatgccatgttttctcttgccttgtagtgtttcaactagaaaagttcaacattcatcaaacgaagacacaatgttttcaagtcatccgattaatcgcgattagtcatccaagtcggttcgggaaaatagcgattaatcgccaagtcgtccgactaatcgtgattaatcgcccaagtcggttagccagaacgaccaccaagtcgtccgacttgaaaacattgcgaagacgtacgactacttccactacatcgacacactcttcttcttttatgttgcatatctagtggtaatgatccatgatcatttgctcgcatgttgtcctggttgaaccttgaacgtgatagctatgctagtgtgttgcgtacacgtttctctacactatgaaaatttaggaatgcttgggtgtctaagggtctttctccaaatattcaaagccttatataaaagagtgctcttgaatgcagttcttggtgcatggcagggacctctaacctctaggacctacccctgagtccaaggccacataaccttagtttatagttgggttggttgtgtcctattttcaatggtgcgtgcctttgtagttagcgtggtttgtgtggcgtgggtttgggtggggctgtctcgcatcattcttgtattcctttttcttaaaagaaatggcacacaactctcctggagtttgagggaaaaaatccct

SEQ ID NO: 7370 - DNA, 823 bp, Zea mays
agtacctcgcggcttccggagggcacaagctcctggcctccctgcgcagcacctacgccatgggcaaggtacgcatggtggccaccgagttcgagaccgccggccgtctcactaagaaccgcagcgctggacgcggcggcgagcctggccgcttcgtgctgtggcagatggcccctgagatgtggtacatcgagctggctgtccgcgggagcaaggtgcacgcgggatgcaacggcaagctcgtgtggcggcacacaccatggctcggtgcccattctgccaagggccctgttcgtccgcttcgccgtgcccttcaggtatggctgttgctgcccatgtccctgctttgttggttttcactgctaatccagccacagtcccataggacatggttgttcagatttaatcagctatatatatcctgagtgatgttcttttgtagggtctggatccgctgacggcggcaagcatgtttgctcgtgcgtggtgtatcggcgagaagaaggtgaacggggaggattgcttcatcctgaagctgagcacggaccctgagaccctcaaggcacgcagcgagggccatgcagagattatcaggcacgtcacgttcgggtacttcagccagaggactggtcttcttgtccacattgaggattcacatctgacccgaattcaatcgggccgcgggaagggatgcggtctactgggagaccaccatcagctcgtccatggaggactaccgcccagtggacggtatagtggtggcgcattccgggcgctcggccgtgaccctggttcggtttggtgagggttgcatgagccacac

SEQ ID NO: 7371 - DNA, 679 bp, Zea mays
accgaagcgcgcgagctcgtcaaatattgaatgggcggcttgatcatttgccacatacctccagtatttgaatgaattgcgtgccagatattgattatctctgtgaatccattgatacgtgggcagacatttacagaagaagatttggatctccctgccattgaaatatatagaccaaggaagatattcgaagccattgacgttccgagaactggagtgccccagcaatcttgtacgccttcaagaacaaaatgttttcaaatccaaatgaagccgtaatgtggatgctcatgcttctttggtactgcaccatcgttttttttatttgtgtaaggcttttctggtaaggtagatactattaaatccatttcgagatttgtgatgcagaatgtgtccggtttcaacatcagtgcgggttagtgtggcaatgtgataggtttttgtcttccttttgtagccttagcgctacaatacgataaactatggagaggaacagcatcatggtcgctacttggccggttgtacataacagtgttgcttagtgctcatatactaaggccctgtttcaatctcgcgagataaactttagcagcttttttttagctacttttagccgtttataatctaaacaggagagctaatgggtggtatttgaagcttaactttaagcacttcaatt

SEQ ID NO: 7372 - DNA, 817 bp, Zea mays
tcttgcatgcctgcagtacagtttacagttctagtatgtccacttctgtttgtaagagtacaggtatcactcagagggatgctatggctaccattgtttgaatgtttgtttcaacggtagactatgtctaccagcctgattattctcgatttttgtctttagttcaaacttgggttccctgaccgaccactgatagcttggttatgggcaacttgttagccccctttgcaagataatgtagtcactggttgtctcgttttcttaaaaaactgcttctctcttggtaatatagcggaaaaagtgttgtttatgttatgtactgctgtgatcagcagatcatgtaaactggacatgaactgttcttgtttgctagatttgatttctgcggatgtcatggactcttgcttcatggatcaacgatgttgctttgaatggaatttagctagaatcgctatacattctgaagcaatctttaggcatttaggcaattgtagccagtggaggcgattgtggtctggaatgtttgaaaccagatgtttgatcaatattattatgacaacaactttgaggaactgcaagttaattttgcttctagcaattgaattgttgtctgcctgccaaaattgtagctctacctctgttgcttaggtagggtgcgtttggttagagagtcaaatagaataaagtggctctattctcaatagccgttctattctgcgtttggcaagaaaaacagagccgctccattttttgtttgggtgaagagtataatagagcggagccgttccattatttgtttggttcgagagccgtgtgt

SEQ ID NO: 7373 - DNA, 1117 bp, Zea mays
atctctttctgctcatcctcccctccgcggacactgatgtcgtggagctgaatataaatatatatgttgagagagagaaatcattgcatgcatacagtaccctgttcttccgtgtgcaagatcaaagcgcagttttgtggagtagtacgcaccttttctccctgtacagcggtcaccccattttgtttgatagatggtggtgcttcgggtgcctcgttattgtatgatacccccacgacgagtcctaattgatcaagaaccagaaatctctagtatatagtgatactgtgatgattgcagaaaatatatatataactaatatgcgtatctgctggtgctctatagtagtcatcatcggaggatctaagaacctgcggcggcggctaagagatcctagtaataatagaagacaagagaagctagccaagtcgagagcatcacttgtatatttatattcaccgtacattcataatctaatcataaactttgtctgtacccttcgttttgcatagacctatgccgtccatgtattgccgttagaacagaatttttcaacacaataagtgaagcgtagaaaccattgtattttaatatcagagttaaacaaatttatcctagaattatatactaaaatgatctatagcttagaatccgaactcagtatagtacttaggagctaagagtttaggacaatgaagtataaatttgggcaaacttacaaaagttgagcctaggataactataaaagctgatttatttggagatgcaggatgtatcactctacttaacaaaattcgatcctattatggaatcatgttgtaagaaactaccatgaccatatattatcttagttcacaaatatatgacaccgttgacttttttcaaaaactttgatcactcgtctcattcaaaatatttattcaaaaatgtaccttaagtgataaaacaaatcacaaaaaataaatggtaactcatttttttaataagacgagtggtcaaagtttttttaaaaaaagtaaatggtgtcatatatttatgaaccgagggagtatatatattgctttctcttgcatgcaagttgtgaaggagaaaccgaaaataaggtatggtagtagtg

SEQ ID NO: 7374 - DNA, 794 bp, Zea mays
gaatatcaagtggacgataagtcactctgcaatggcaaactgaaggtcttcggaaaaacatgaaatggagtgttttacataaaaatctttgtttgttcctgataccgtaaccaatttaaatggtaatacctgatcaatattagtgaaacctcttatagtgtcgccaccaacaattgcaatccctttatcaccaattggctgcaatatcagtgcctacaaatacaaactaagttataatgctttgattcaaatacttctgataatccctccatctgacttttggatgatgcttaattgcttatctggacatgaaaataagacttctttcacaagtaaatagattgtgcttttgtatattattttcataaggataaaaaaaatcagccatcgagagtttgaacaagtatcaattgccccaaatatatgcttcaatttaaaatatttctaaaacaaagcaaatcagaacctgtgtgttagcaggcaagaacggcaattcagacctcccaggatacaaagcaagatttgccagataagattctgcaagaagactatggtgaagtttctagataagattctgcaagaagactgatggagttttgtaaagatatactcacgtttcttggattccatgacacttttgtaaagagagccttgggtaaacttttgtacatccacattaagtgcattaccatctttctggagatcccgcaacaaccccgatttgaagagcgcaattacctccatacacaataaccaattgatttgaaacaagttgcagtagtgagggaatccca

SEQ ID NO: 7375 - DNA, 1511 bp, Zea mays
aatgtccctttaagccacctccatgtgcttcctgtaacaacaacaaacgaacggagctagctggaatgcatagcttgttagctctaaacacaaacccatcacaaacgatatatttgttccatcctttcccatctttacaatgcagcaacacatctttaaaatcagcatcatgaacatattggtctttaatcgtctctaatccaaagattttgtagtcaagttgattcagcaaagtatatctcctagacaaagcgtcagcaatgatattctcttttcctttcttgtgcttaataacataagtgatgaggacatcactgccatcaatacaaccacaccagcgacccccttcaccatttaatcatggactagtgaaacgagtccgtgcacgtaaatttaattatcaagtgaactcgttccttgttgttgaagttaatcattccttaatgaggtattaataccttgtgattactttattatgctaaggtgtttgggaggtgaaccatctagaatttgagaaggcaacaaggcaataaaagctgctccacttgaagggatttcgtaactgcagtaggtgcaagttgaaaaggccatatctttcaactaccaaggccaatgaaggcaaataagcacttgatggaaagcactcttcgtctacttcttggtggagaaagaatcaattagagataccaaatgaggcgtccagaaactgtcgagagaacttcttgactccaccagcccgagggaattcgtaagcaccatattaaatggagcatatctttcatctcccaaggttgtttagtgcaaataagtacttgttggaaagctctcttcgtctactttctggcggctgaagaatcaatgggagaaaccaaacgacacgtccagaaactgtcgagagagcttcgttctccaccagaacttctttctattcctctatttaagcaactagcagccaccaaagaacttgggtttttgtttgatgtaagtttagcctttgctacttccttgtaaacgcgtgtgtcggctagaccacccggatacttgaaacagaaccccaactctatcagatccgtgagcgtctgctttttatcttgttcttgcttgttctcgattgcttgcaggttcaaggctgttcttggcacggcaagagcagcaacaacaggagccggtgtaactatcgctaaggcgcaacacccttgtggttgttgtagtcggatagcacaacgtcgacctccaccccaaatcgtagttatcaggagacggtgtacctgtcgctcaaggcgccacaccatcttggttgtggtagtcgggcagccaacgtcgttctccaacaagttttccaccaccatcatctctcatcgaaagatcgggcacccttctacccgttgggtttatcaagtggtatcaaatttcatgatgctcggtgagaggactcaatctggcttgatattgttacctacagtccacttttgcccaaagatatatttagagcagaaattcacctaaaaaca

SEQ ID NO: 7376 - DNA, 820 bp, Zea mays
aacaataaactttgtgtaaattcaatccagtcaactaacaaaagaatcaactctccatagtagtctagcagaaatactggattcaaacagggatcaaacagacaaaaaataaactctgcataactggattattaaaatctatggtaataacatgtaatattggatctttactgatttacgaatgagtttctatagcatatatatgtaaatatgtttatttgattacgagttcagattttggaatttaggttaaaaaaaattgatcgtcttttcttaaatgaatcgaaaaatacaaccatccatgttttcctttttttaaaaaaaaaatctaacacccatatgacttctagacatggaaataggtttttaaacattgtaacacaagccatgtcaagtacacggctgcttgtttatatactgattaagtatcagaagaggtgaagctaaagcttggcatttatgacaatactatgaacctctaaaaaatctagcacataagaattcatagttgctgcaaacagaagtgcttgacaagttaattgcatgaaattaaaaagagaacaaacggtgttttggtaatgcaaatttgtttctttgaaaaaagaattcaacactgcacttatgcaaatgaaaatgttaagctcaccttgattctgatattgtggacggaaggacacagcaaggttttcccagtcctgaatgttcttcctctcctgctgcttaacaggttgatcatcagtttcgtgtttctttgcaccagcagggtgggaagggccccataaacaaagtcacttcctttcccttgcaccagctgcctctc

SEQ ID NO: 7377 - DNA, 825 bp, Zea mays
tgaatcccacccatcttagcttccattactaatctcgttatccacaatttctccctcttttgtcaatcgtgtttggtctgattaggagagggcgctaaggaagatgtccggatcaccggtgttactgtcaatggaggactcctctactgccaacgttagttttcttcaactggatttgcttgaaattggtcttgttacaaaatacctgctgttggtgtatcaatttctttggggtttgtgattgcaaagttatcagatgatgaggatgatgaaaaattgggcgatgctgatgaagatgctgagagcgagaagctcagccaacctgttgacaatacgtctgataagcctgacgcacccagctgccgccttagatctggtatagaggtttagttcttttcttgttttacatagagccttctatcttttatgttgtgtgctcacttagagttttggtgttgtatacatagatcatcggaaggagaagtcccttgggctcctcactcagaattttgtcaagctcttcctcaacatggaggtgagaggactgaattcaccctgtatggtttgggttatttccctttcgcacttaactgtaatgaggcttgtatttcgtacaggttgggacaatctcacttgacgaagctgcaaggctttttcttggagagggacatgcagacagcaacatgagaagttagtacatgcattccttttgtttaattccatgcttatgcccaaatatttttcatatccaaatagaatttgcactgattctaatatgcaaaagcacccaaagtcgtcgattgtatgacattgccaagggcttgc

SEQ ID NO: 7378 - DNA, 797 bp, Zea mays
ttgttttctcgttccattgccctgccggctggccgccgtcaacccgaccccgttccccagctcaccgcgcgcgctctctcagtctctccttctcttgtggccacgacgagcgacattcgctactcgctaccgtcctacgccaggtgccccaggtcttcttcggttccttcgccggcgacgaacgctaccaggtacgcgcaccctttgtcttcccttccctgctgtgcgaaaccctgcacccaaaccctgtactcggatctgatataattacagtgtagtgtatacatgtaaatggctgcccactgcactactgcttgattggctggttgctgctctctgcaatttgggctgctctctgattgattcggtattgtagattgctgagaactcaatgtttgatttctaattgtgcagattagactttgcagaaagtaagaattcacattcacagttatataccaagctattttttttcttttgcatggctagcagctagtgtttgctaatcttttgcatttgacttatgatttaagttgtctaggatctctgtgattacctgagtcctgaggtgtgagtgtgactgagcgttgtgagaactgaagtgagaacttgacagttgacaccttgacaacaattggtgcttttgcttatggactaatttggcaatgttttatggtattgtgctgtgatgaccaatgttattcagacatgacgtagtctgaatctatgcactcatgatgttatgtactattggaccgatctcaagacatgcttagtagctgccatttgtcaatctg

SEQ ID NO: 7379 - DNA, 761 bp, Zea mays
aatcaattattgatatttaggaagtatcggcagtttttttcgaaggaaaatggcatgagctatgcttttttcaattaagagaggaaggagatttaacatagtttttaaatacacaagtgcagcacttcaaaaacagtacacaatcttttatattgtagttaaccacagattatagatctttaaattgaagtgcaacattaatttcttttcataatcttttatacctcagtagccttggcttggacatgtaagctgcatgcattgtgagcatggtggtctgaaagccctgagatgtttgtgttggtactcataagttgcgttcagtagatggagcatttatgtccaactgaatacaaatcacctaaacctcaaaactaactcatggaggagctcactttcgcttggaaatgtgtggccccttttatgctggcttgccatctgattctgcctcttcactaccaatcacctgaattcattgtgcaaggaaccatgaatcctttgctgcttgaacttgtcgctctcttggtttgtgcggaaagtataaactgatggcaataatcttgaacactatgctgaaaacttgtgtagccaagtttgggagcttgaaaaaaatgtgcttgtgcctaaatgtcgttatgcagtaagtgtttttattgtccttgagaggtactgagagggtgcttgtctgcctttctctccttaagaaaatcaatttaaatttagtataggctgattttgtgtatatatttttattttgccat

SEQ ID NO: 7380 - DNA, 850 bp, Zea mays
agtcgacctgcagtctccagagtctagagacctccaccgtccactccaaagacgagcagcgggcaaacccaagcacccgcccaatccggttcgccttccttctcaccccgcccggactctgcggagagatctggcagcggtggctatgccattgggcgacgacgcggcggcggacttcgcgctgccggacgagctcctggcggcgctgccgcgggacccctacgagcagctggatctggcgcgccgcatcaccgcgctggcggtggcggggcgggtgtccgggctggagcgggaggcggggcgcctgcgcgcggaggccgcggggaaggaccgcgagagcgccgagctccgggagcgggtggcgctgctcgacgccgcgcttcaggagaccaacgccaggctccgcgccgcgctcgaggacaatgtgggtcgtgcccggccggagttcaatctgtctgcatttgcgtccgtttgggtttctgaaactggcgcttgcgttttggtgcagattaagctcagcaaggagcgggactcgctggcgcagacgtccaagaagctggcacgcgacctgcacaaggtttctttctcggcctacccttctcttgtacatatcacatttgtaggtgtgtagtgttgtgttactgtgtagtgtagctaggattcgaattccacatatgttaggaaagtttttagccaggagatttaggtcttgttgggttatttaaattccgggtggatttgtgtgtattggaatggattgggatgaaatttttgacttactatgggattaaaaacgacttcattccatctaattcacatgggttaaatgctggaacgaccaaccccctta

SEQ ID NO: 7381 - DNA, 800 bp, Zea mays
atgagctatcaaggtgttgttaggtttaccttacaacatatgttgattagctattagaggattgaaacgaaacatagcggttttgacattgtgaattagtaattgaggcaacaacaaatcacagcactgaatataaattagcaagaattaagtgaaatgaaaatgacttataggatacatattgtttgcattatctgcaactggtggcttgcttggagcatttgtaacattgggcagcattgacatgtcgttcagcatattagtgcttgcgtttctcttcttctgggcatgattttctctgttagcttcaatgcttttgggagtactacctgtttaagaatgctttgcttacatttaactaacttggtggtattgcaacaaagccaacgctaggcttcagatatgaaagcagtttttcagtcaccaattaagggcttgttcggttacgtctggatcaaaggggtttggaggggactaaatcccttcctagtcaaaattgaatagaaggggatttaatcctctcaatccccttcgatccagactgaaccgaatatggccttaggagggaattagaggggattaaattccttcctagtcaaatttaaacagaatgtttaatccccttcaatccctgggcaaccgaacaaggccttagtgattacactaaggcatataaccgtccattcattgtggtctgatactaacaatgcccaattgccaaaaatgtccattatgttatgcacaggccttttggtcctccctggttcccatcagaccacaatgacgtccagtccagttgg

SEQ ID NO: 7382 - DNA, 743 bp, Zea mays
cgccgtccgcgcgggcggcggcgggcaggtcccacgccggggtggagctcgcgctcgacgcgccggcgccggcgccggcgcctccacctcccaggtacgtggccgggggcacggccatgtcgtcctgcacgacgccggggcggtagtagccgctgcggtacagggaggtggcccggccccgtggcggcggcggcgacccgccgcgcctgtgctgcgcgccgtgctggcggtggtgggtgcccgacagcttcagcaccatgtccttgagctgcacggtgcacaccaacaacaacatgcactacgtccatcagccgctgcctggtggattaagattgcagcttgtgctgtgtggtcaccagctacgattcagatctcatagtagaattaataagtaatatggtcagcagccacattcagatttcagagtagaatggtatgatcacaagagctacaccatctcaggatcaggtttcagaattcagtcgagttctcggcctaccgccatttgaccagcacctaataataggtaactatcagtaacaataatctctgatgttcagttcagagcttatcagaatgtcatcagtcatgctgtgtgctcacgctccatgtatagggggtaaaaaagtgtttgttctaccatagggatagggtaaaaaaaaaacacaggtttgtttgaaggtacggttagggcctaacactagcaggctgggcaccccaaaacaaggatggattctctgctg

SEQ ID NO: 7383 - DNA, 890 bp, Zea mays
agcttgcatgcctgcagcgaccactctattaccactttaccagtaccaggtagtagtacgtagtacatgacatgcgccgagctacggtgtacggttagtcggttaccaaccaaaatgacgcgtggtcgcggcgccgtggaagtgcgcgccggccggagtttcccccataccgaaccgagccgacgagcggtgactcagcatgcaccagctgccccccattcggcgcctggccgcatgcagtgcaccgggccaccgccgctcggcactggcaggcagccgccgcaagcccgcaacgtgcggcacaccgcacaccggactgtcagccgcggccggccgcgccccctgcatcttgcagcggcagttctctcatctctgcacggcgtggctcctctctgcgtgcgcctcgctttttcccaggttcacctcccctcgcccccatcgtggccacgccagcgcccaaccaccgatcgccggcccgcctccccccacgcaagccctgtacacgtgtccaccggtgccgcgaccgacccaccttcccactgattgcgaccgccccaaccacgtgtcccttctccatcactacacccgttccctcgtgctcccgccctgagactccctttctcgctggcaggtgggcgacgcttcagccagtccccacatgtcattggagatgaatcctgcgggctccaacaaagagcggtagggaagagtacgtactactgtggactccggatatttttctgggcagcccgagagacagaacccatgtggtgggggaccgcaatagtaggcatcaataaatcagctgccgaggcggactgccccacccaccccaggagcgccacgtgtgtgcagcacagggattaggcgataaacacaccatcaaactt

SEQ ID NO: 7384 - DNA, 775 bp, Zea mays
atggcagacacacaatggtattgtttctagttaagcaatgacaattttttctcattctttaatagttgtattttcttttcaactttccaagtgcagttatagaaactagaacaccttggccggtagatcgtgcatatggttgtgcaaagaattgttctgtactatttacagagtggaaatagaagatgatgataagtaaactgctggagatagccatatagtggatcactgatttgagcacttcatgtttgcttgagttatatgctctcgtttgaactttgaacccattcgggcacatttgtcggtgttactttcttttgtgatgggggggggggtattgaagggtgataattaacctatcttactagcttgacaatgtcagcaagtgctactttatttcattataaattgtttagtgtaaaagggggaacaaaatgccatcatatttcattcgcaagatatgctctgaatgctcaccctccttatcctgatcttcttgttgcagtccaacaggaagttgccatctcggaagattattacccctctgaagggtgttggactgagcatgagagatttcactggattttccactgttgttccttcaccacacatgtattctacttccatctttaccatgcaccgtttcccacaattttgactgactgacaatgttcgtggtacaacagcccctaatcctggatgaacccagtttcaccatgctcaaggcccccctgcggcagtttaagcagttcaacgtgaggtgcatgcgttcttc

SEQ ID NO: 7385 - DNA, 808 bp, Zea mays
tgatcagtgggggcaaatgggtgcaggttcgcaaagttgggaaatgtaacaggtatcatctcaacagtagcgtttagcttcattgtgcaagaacccagagggatcatactgtggcatagcgagagatccttggactgcaacttatgcaggtaacgaagaagctcatgctctgtgtggtacctgcaagcccagagcatgaaaaatcagacatgttcccacaaattagtggagcagacgcgcaagcattcagatttcagaggcacgcacatgttgaagactggatgcgttaggtaggggctctcgcgagcaaggctgctaggaattgagcttgagacctctggtgcgatggattcggctgtgaaactggcctgaaagtgttcgcaatggcacaccatttagtatttggatctaatcacacgtcatcatttaatagcacacgccgaattatactttgaagtttgcagtgattgagaacgagtacttactgatttgccgttgttgaacaccttgaacagcttgtcaacatcctccagggtggaggtctcatcaaatgctacagtgatctgtaggaacgcatcacagttagaaggtaaataaataaatggtcagctctcaagatcatcacgacgagctggaactggaatgaaacagtgacacatagtagtgggtggccaagaaaaagcgcaccgtgttggcatcgacgacccgaaggttcatctcgttcttgacagcttccttggcgattgcacgtgcatcggagcacgtgaccctgaccgtgtcgaaaaagggcaggacctgcaccgtcact

SEQ ID NO: 7386 - DNA, 823 bp, Zea mays
ttcacagcgatggcgtacaagttctccaacctggccatctgcaaggccgtcggcggcggcgggaggaagaaggtgcacatcgtggactacggcgaccactactacgggctccagtggccgtcgttgctgggctactggggtagcctggaggctgggccgcccgaggtgaggatcaccgccatcgacttccccgagcccgggttccggccggatgctcggctccaggcgaccgggcggcggctcacatgcttcgctcggcggcatggcgtccccttgaggttccacggcatcgaggccaggtgggacgcggtttcggtggacgagctgagcatcgagcgcgacgaggtgctcgtcgtgaacggcctgttcagtctcggtaggatgcaggagcaggagcaggacgacgtggatagggatagccggccgagccctagggacacagtcctcggtaacgtccggaagatgcggcccgacgtgttcgtcctgtgcgtggagaacagctcgtacggcgcgcccttgttcgtgacgcggttccgggaggcgctcttctactactcggcgctgttcgacatgatggacgcggtggcggcgcgggacgacgacgaccgcgtgctggtggagcagcacctgtttgggcagcgcgccttgaacgccatcgcgtgcgagggctcggacagggtggagcggccggagacgtaccggcagtggcaggtgcggaacgaacgggcagggctgaggcagcttcccgtgggatcctgatgcggttcgggcccttataagggaaggggagggacaagtcccccagggacttgtttcatcgatt

SEQ ID NO: 7387 - DNA, 796 bp, Zea mays
aaggaaccctgcaacagaaggctgcaaaaacttggtaactccctcggtcgatgcatgcgccctgtgggctgttccaaatgcatcgttaacataaagatctgctagggaggcaagcttctgtgcaaactctgggtcattcttctcctcttccttgtagaatcttacgttctcaagcagcagaaccccaccgttgggcaaggccgccaccagcttctcaacttcagggccaataacatcgtcggctttttgcacctatttgtatgtatagatacgctttagtcagaacaatcaattagcacatgtgatttcattacaagtaccaatgatgtagaataaatcaatacctgaatgccaagaagctcagacaaccgtcctacaaggggagctaagctaaacttgggtgtaaaacccttagggcgaccctgcacatccagagcaaaagggaggatattaatcatgactggatgaaaagattattaagcagcaatctgagataaatatattggttcagcatatctttcataaaattatcattgaacccaataagaaaatctgcaattaatagtcaatctgtatatacaaaaccagaactttaaataaacaatatcctatgcaggtccttggctgctacattgtgacttgtgagtgtatgcaaagagcaacagttacagagtccaattttctaaattggagtcacaaacagattctgaattaaaagagcagtttttccctacttttgtaagttcttttttcctaaaatgagtatctttcacctttgcagaaaataccagtttgg

SEQ ID NO: 7388 - DNA, 826 bp, Zea mays
atgagttccgcatttcacccacaaacagatggtcaatcggaggtcacaaacagagtgatattgatgtacctgcgctacttagcaggtgacaggccgaagacttggctccagtggctgccatgggcggagtacagctataattcttcatatcaaactggcatcaagtgttcacccttccgggtagtctatgggcgtgaccccccgccattactaccttaccagccggggaaagcgcgagtagctacggtggatgactagcttcacgatcgggatgagttcttagcagaaatcaaggagagactggtccaagcccaagtcacaatgaagcagtaccaagaccagactcagcgggaggtgaaattccaggttggggattgggtgtggctccggttacagcaaaggtcagccgtgggcgtgacaccagcatctacatccaagttgggacctcgtttctttgggccctacaaggctacacagctagtgggggacgtatcttataaattgcaactccctccgaaggcaaaaatcatgatgtttttcatgtgtcactataaaaaattattgggcagttgccagatgaggtggtgcctcttccagatctgttacatggcagggaggtacctacacctgagaaggtatccaaggcaaggcttaacagaggcgtgtgggaagtgttagttcactgggtgggtcgtccagcagcagaagcatcctaggttcagctagaggatttccaactacggtatccagctatacaggtcacggacgacttgtttctccgggaggggagaaatgttgcaaatgcatttgtggggaagacctacac

SEQ ID NO: 7389 - DNA, 818 bp, Zea mays
  unsure (1)..(818): unsure at all n locations
ttgcatgcctgcagcagcaagcgttactagccatcaagaaggagccggcaccgcggcggctggcgtggcgggaggtggaggcgctgaccggcggcttcgacgaggccgccgtggtaggccgcggcggctccagcaccgtctacctcgccaggctcctggacggctcgcccgtcgccgtcaaggtgcaccgctggtgcggcggcgagcgccggctgcgcgccttccgccaggagctcgacctgctccgccgactccgacacccgcacatcgtcgcgctcctcgcctactccgacgaccacggtgcgtgcgctgccgctcgtgtatatactaacttactattatacatggagatgcattaaatgactgttactgctataatgcagaggatgagggcgcgctggtgctggagtacctcggcggcggcacgctggcggacgcgctccacggcacggcggcggccccgctgccgtgggcgcagcgcatgcgcgtcctccacgacgtggcgtgcgcgctggagcacctgcacggcggcggcggcggcggggcctccgtggtgcacggcgacgtgtcggcgtccaacgtgctcctctccgacggcggcgtgcggctctgcgacctgggctccgcctgcgagggcttctcggcggccgtggcgccggcgcgcgccgccgtggcgtcgccgggctacgccgacccttttctttcctgcgccacggggcatcgtgtccagcaggtccgacgtgtacggcttcngcgtgctgctgctggaggccgtcacgggcctgccggcggcgtccgatgccgagaacctgacggcg

SEQ ID NO: 7390 - DNA, 841 bp, Zea mays
atctagaaaggtgtctaagaagcaaaaaaggatggcagcgtctggtgaagagaggcgtccacacgctcaggaagccacagtatcaggtacgacaagtggccccaagtacatgaaacgaaagaaggattacatggatctgtacatttatgtaacacactaactatatctggtgtacatgtcgtgttatcagctgtgttatgtggatcctggaattgctagttcagaagaggtggagcgactgaagactattgatggcacactagtcaggttttaggttcctggtaagtacggaaactaaacctgacttcctttatctaattattgggtttcattccaccgtcttgttgataccttcatcagttactttgacctaacaagacatgcttggttgactcgtcgagatagatgctaagtgaagcttgctgcttttcaacaatatttgaaaatctgcgtggtggtattctggagggataggtcaaactgccttgaatagatcttgacatgcccacttgggcacttgtcctaaactgaaatttacaccgcgttttcgtttttttaccaggttgtagtctgcgggatcttgatggtggttgtggcagtcggcaattttgccaacactatgtatacactggtggtactgaagctgaggtttaaagcaaagatgaagagagcaaagggcagacaggatcccccacatcaaaactgacaggcatgatcgttcctggaacacaaggatgcagcagctgctggcaccatctcttctgtaaatcctttgacctgtgtcaacattttttggtgctgccgtgctagtagtaggagtatcttgcaagcttttgttttg

SEQ ID NO: 7391 - DNA, 856 bp, Zea mays
cttgcatgcctgcagctgctcacttcgctttcggtccggaggcgaagggggcaggaatcatcattgcggccgcccggctggacggggcccgtcggcgccgtacgtggggcgatcaggtgcgttcgaggcggcgccaacggctggaagggcgctgcaaaaggacgtgcgggtccatagggggaggagtcgtttcagcctggccgaggataacggatcgagattacgtgtggcgttaatcgcgacggggaatcaaccgagttggcgtgcaagtagcgtcacgcagccgtgctttgggctaggaaattctccgcctcacggaaatggctggaggtcgaatcattgcctaaacttaataatattcttcttgttgttgtcgtcgtcgtcttgttgatatcattattgaaatagcgggtgccgtattattttttagatgtaggtaaccagtcttatttcctttaaaattacttgacatgcaggtaaggatgtcaattttcctgtgagagccgatctaaaatgaggcgaggatgagggtaaagcgaaactagggatgacaacagtaaatagcaatagctcctcatctcacggggatctacacaaacgatatgggggacgtttcttcccatcactgttcgtcgtgaagattaatctatgtcgggaattctcgtcccggtttaaattataattagaatatacatcatttgttattaatctaaaatattgtcacttatacacattatgggacgtaagaaaatcattatatgtgcatcaaaataaacatatttgcaaaatgaacagtctcttgacaagtaattatttatttttatcattaactattaacaaaagacatcatcacgtg

SEQ ID NO: 7392 - DNA, 851 bp, Zea mays
cttgcatgcctgcagaactgacatggttattcgtattttggacttatttggacaggctatagggctgaaagctaatgtgcagaaaagcactgtgacccccatccaatgcactcaactggaagtctaagaagtgatggactgttttccttgtaaaattgaaaagtttcctatcaaatacttgggcttaccactctctattaaaaagctgtcaaagaatcaacttcagcccctcatagatcggctagctgacctcttgcctggctggaaggccgatctaatgacgagggctgggcgagccactacagtccagtttgtgctcacggcaacagttatctatcacgcaatggcgcttgacttgcctaaatgggctctcagagccattgataagattaggcgaggttttctttggagaggtcgtaaagaaaccaatggaggtcactgcttggttgcttggcgcaaagtcactaggccaaaggagctaggtggcctcggcatctctgatattcattgtctgaattgggctttgagggttaggtggctttggtttgctaagactgacccaagcaagccttgggctgatctgccctttaatcaaatgtgatggttcaagccctgtttaatcacgccatggattcagtcttgggtgatgatcaaactattttgttttggaaatacagatggcttctggggcaacgcatagctgacttagtgcctcatatttttgctgttgtccctaccatattgatgaatagaagaacagtggcggaagctatgggaagaatgagctgggtcagaagaattgaaaggtttagtttctcaagagattatttctgagggcctacaactttgtg

SEQ ID NO: 7393 - DNA, 840 bp, Zea mays
cttgcatgcctgcagaagatatgagcatcatcctgccagacataataaaacatcaaagtaggagaaaacaaaattagcattaaatataaccggacataaaaacaaacaactcacagaaaagaagacttgcctgctggaatcttctaacccgtgtcaaaccagtaagtgcaccactaagctcatttctatgaagcactccgaaatcagccatgcgaagaggcaactctgtagcaaaaagtaagccaaccatttgaatgtccctagtttgattttgataattgagtgacaacttaggtgtactaatatgtgtttatgttgagatacacaggtgattcgtccataagtacactagcgtgagtaacttgagccatggtggtgatgtagctagtttttttcatgtggatagatagagatgatcaagagacatagcttggctacgaagaaccgggttactattgtgaagggaaagttggaggctcgggtgcgatgtgtggtgaagcttgagcaacggcttagtgccgatggaccggctgcaaccgtaaagagcaagcggagttgcgaccaatgaaccaataagaccacgtgatgacatggagtgactgagtgaatcatatcatttacaaatgtgtttattacaagtgccttgatggaggttgatgcttcatcagtggaggagatgaaatgaaatgccgaaggcaaaggtataacctgtgggccatttcatttcaccagtcaaaagttgtgtagaaaagtgcatgaccaggtttaggataaatggcccgtgctattaaaaagagcaaatgtgtttgcatatcggtcatctagtgccactgaaatgat

SEQ ID NO: 7394 - DNA, 840 bp, Zea mays
taggacaaacactggctagcaggctgctgccttgatgggctgggaggttcactgggccatgcctagggctacatgtattggaccacaaattttcaacgtgggtaagccaatttgtgagccatgcctacggctgtggccctaggcccatatccctcctggcttaaagcttcattctttcttaactattgtttgtttcatggcaaatataaaattctccatcttttttcttgctatccttattagctcagcagtcagcactttttattatcctttggtgttttgtgtcaccatcatttggtacctgagcttttctatagttgcatttttatgttgtgtcaagcacaatttttgtaggtataaaagtacgtgggctctagaattatgaagagattaattttgagccccttttatcaagtactcagaatcatgttaatacccattataacaaacacaacaactgcaatgtctgactataagcaccaagacctttgcttcacaagatagaacacttatagggtagggttttgctgttttggtattggagataattttcatggcttccattcagatgaagttgcatatctcttgtatagacaataaaagataagccctaacaaaagtatgcactcaaaacaacaactcttatacttatccccaagcaaacttggatcaaatcttgattggatctatatggtcccatttgccagcactttttgtcactaatactaactccaaatggaaccacatgcaatttaagcttgactatagctgctccaatcatccttttgtagtatcttcatttttaccctaaattttctaccattactgtgcatttggtga

SEQ ID NO: 7395 - DNA, 839 bp, Zea mays
aagtgcaaaacagcctctgtatcggaacaaacccagctactttcagctacgtagtacatcgcacaactactgcgagtctgcaaagcacgtacagtactggaacacgtctgttgcagattaaagctcccgttgactgtgacctgggcaggtgctcgtgctcgatcgaccgcacgcaccgaacctagcacagccatgcatacgctgccaagcaaaattgcagttgcggagtgtcttttgatcggcgcacatgcatctgcatgcatgccgcctgccatctctgaaaacgacgcggcgacggaaacgttgccaggaaacgctcgctcgtcgacccgaatgaatgggaatggtatgattgctcatccttcagatccaagaaaaggcgcgcgctccctgtgctcaaccacctcacgaactccgtggctataagactcgccgggccataacactgaactgatcgagtcacatgctagcgtgcgtgtgcgtgtgcaacggctataccacctgcgcgaaccaccgcgagcgcccgcagctaagctagctctcgctcgcgcgctctgggagaggagagatcaatggcgtcccgtggcagcatgacctgtagtcttcagctcgccgtcctcgtttccgccgccatcgcgctcgggttcggcgtccgggccggcgaggcgcagctgtccagcgagtactatggccagacgtgccccgtcgtgcaccgggtcgcgcggcgggtgctgaaaaaagcgcatgaggccgacgtccgcatttacgccagccttaccccgcttcacttccacgactgcttcgtgcaagtaagaagcacaagaacccgccccgtgccc

SEQ ID NO: 7396 - DNA, 759 bp, Zea mays
tgcagcagatccagctgaggcaagtgatgaatcttggatgactggctgagttgttgccgttgccagctgcacctgactaccatcagcttgttgtgtttgagattgtaagccctgcaaataacaaaaaaaaggtaaaaagaaatcgtcacttacagcatagttctagacatccataagaagttactgaaggtatggacatacatggcagacttgagcatgttcttgcacttgacgatgcacaatttgtgtcccacaacgattgcaaacaacaggagagttcccatatgcacaagcagtaccatgtgtgacacaggcagatagctccccatgccattggcatccactcttattatacaggcaatagaccgcgactttgccaatagtctcagcaagggttttatttgattccacaagaggctgtagattgcaaaatatgtagtaagacgagtgccattacttcactacaagaactcattggatatgcataccttggaatcagcttctgttacaaggtatccatcataaggacaagcttgtgtggttgccactacatatgccaagcaggatttgcagtagagatgtgtgcattgagtttgtagggcctcattcggatatacaagtgtccggcaaacagggcagaaatattcaccaggaagggattgaatactcaagatgcattcattatcaaaccccattgctgaaacttgttaaaattttgccccagtggtcccagtcaaatatcaagccctgcacaaataa

SEQ ID NO: 7397 - DNA, 790 bp, Zea mays
tacccactgtaagtaacacgtgtcatttcaagatattcaatctattagttttttatgatcaaattgaacagtagagatggcacatgcacatcaacagcaagcagacattgtcactcggccggctccaatcccccctcccccacacacacaatctcgaggtcagctttacccgtggacggtgatgtcgcctgggtgctgggtggtgcagctcaatgacttccgtatcaacacctacccctctggatgctctcagctgctacttgtaataatagttaatattattacaattttcagggatattggatcggatcgatccggtttgggaacataggaacaatatgtattctagattcaagtgaaagtattacaagaaattgtggaagggtggtgctacatgtttcaagcaacatctttcaagaaaccatggagggggagaggtagcacgtatgagacgagtggtggctcctaccatgagggtgttcgtgccatgtttgggagaacatcttttaggaaggagaagatgctacacaaaaccaatatcacaacacacttgaggagcgtaggaccacgttcacggatgatgaagtgactcgtcaaacaatgaggtcggtgtactaatgggaggagcccgagtactactaaatattggtgaactcatggagtgcacttctatatggatcgagcagaattgggcgaaatacaagacacaattgatgcttgagcaaagtattatgttgttctcatatgaggagtataatacgacacgattggtggaatgcatacccgtgag

SEQ ID NO: 7398 - DNA, 788 bp, Zea mays
acttcttccaaatgcttcaagaattggtgggcaggcaggctggcagacgggttggaaacaatcaggtcactgcgaaaacattatctggaaagcagtgactgttcctggcgcttggttagagtataacatgcaagacttcctcagcagcacgtttacagaattgcaggaggggtccggccatctggtcctctcattttttccctgggtttagtagactagcttcatggctcttgcttcgtatgatgggaaatgcttgttgtgccatatgatgcaacctttcaggataagataatgttacttagacataattgagagcctgctgttaacgtcgcacagaaatatcaaccatctctcctgtttgctaacagattgtgtgttcttaccagtctgttcagttgaataagagaatttatatggtcttcgtttatggataaaggcaatgggggcatctgactcatgataccaggcgtttcgctcattctgaaacagagtacataagaatagacgttaacatcagtagtgccaggtctcaactcaatgttgtaatcaattgcagaaggtttcaaaactcaatgcggtacctgcttaaaattgttttgatgttgttactcgtgcggagaaaaagatctgtgttctccactgtctgcaagaaaatcaggcatgaaaacagttatgatcagttggattactaaacttatcatgtttttttttctaaaatgcatggaagctactttagtcctttatcaaaccaataagagcgacatgtttcaacgagttttataatgata

SEQ ID NO: 7399 - DNA, 806 bp, Zea mays
ttgcatgcctgcaggcaagaaagcatgtcaaacatgtcgcagcaacttcagggttcaggctagttaagcttaaactgaacaggggagtagttaccaaaaaagtttcttagatggtgcagttagtggctcttccttgattgcgtcaggtagatcacgaggaataggcgcatagcctccaaacaagttccagaactctccagcatcagaatcaccaacaagctttccatcctctacaatcagtgacaatgtaaacaaaattggagctagcatctttccagccattcttttgcaaaatcaacagtctatagctgtacctattgtcgcgatctcacatcttcccaagtgtcgattctccttcagatgcttaacaacatccaacgctttagcccttgtttgcatactagaattacagccactgaaaaggaaaagctttgacggcgtgtccactataaaaaccgatttgtgatccagagaggaccgtgaaaacggaacctgagacaggatttgaaacacaacaggttgtcttgcatcagcactcagcaggcaccaagaaacgaatgaaaatcctgagatagtatctcttcttacttgtgtgacacgagcaacgtgctctccttggcacctaaacatcgtggtcgcgctggatctatcaccagatcctttcaggtgtgaaaagaagcggccttgtactgggatgacacacggtttgaagtatgacaagaacttgtcagattcttcaccctgtgtttccctgtactggaccgtgctggaaccccatgcttggtccaacttaacaacctttgtcg

SEQ ID NO: 7400 - DNA, 834 bp, Zea mays
ttcctctagagccgacctgcagacagggcaggcaggtgtgctggatggcaaagccataggtctcttgaaaatactgtacaactgacttcactgtgccaccttgatcaacaggaaaactgtggcaaatggcatcaacattcttttaggaattttttttctctgaacaaatgatccagagagggaaagtgtaaatgcaggagttcatgaagaaacatgggattttttttgccatacgttagctcccgagtttcctgagatgttaaaccagctattcgatacttgcgtcgcatgttaccacggtgcgtaacttccaccttcacgcctcttaaggccttctttatctgaaaatcgagtaaattaatcaaaaaaaatattgagtaaagtgacgttacaaatatctgctagcgtaccttgacacgttcagcgtctaagaggggcctcgagtagatgtcgtcggtgtttaaaagctgtgcaacaaaatctatgacaggtaagggctcaaagaaagcagttgcagacatatctgaaaagacaagaaaaggttagaagcattcagtaatcttgtatgtatgtatgtatctgatgagagagagacagacagacaaacagacagagttttaccaatattcaatgacaagcccatttgagtagggcgaatgctctggtaaaacccacgccagctttctattccctcacccaagggaacgccttcttcccaggtcaggagagaaaaatgatcgcccaaacggtgcattattttttaaaaaaaaacaagagagagagagagagagcccaatcatcagtgcatgtatcatcctgaaacctagagagagg

SEQ ID NO: 7401 - DNA, 860 bp, Zea mays
agtattatatagtatctcctgagcaaccaacgcaatagtcatccaaccaaccccaagtgcactcacatttattctgctgcgccccgacccactgaaagaaagaaagaaagaaagaaagaaagaaagaaaaaaagaaagaaagaacaggctcccctagctccgcctgcccaagggtgatcacaagcggccttctgcttcctctgttcttcctccgtcttctcctctcgtcaaattctaaaaactggacttttcctctcttggcagcgcattgagtttgtcagtttcactgcccacggcatgggatcttggagacaaaaactgcctgggttaggcgagggctcaggctcaggctcacaggctgctgaggccggcggtggtgggagaggtttccgtggccgtggtggcttctaccatcaacagcagtccccacaaggtggtcgtggtcgtggaactggctactacagtggtggtggtggtggtagaggtggacgtggggcagtcccgtccgccatagctcccgagctgcgccaagcaatgcaaacttcaaatgaacctgataacatcccagcgccagaagcaggctcccaattccaaggatgcgccgtcaccaagccaaagaggcttgtggatcagctgaaaaggcttgtctgtacaggaacattgtgcaaggcgttttcaagggtcgagcaaagtttccctcaaccggccagggaaatgggaagcggttggccacccaagttgttttgggtgaaagggcaaaaatcaactttcttttggcttgaaaattatataaccctgggccaaagaaaagggaattttcaattcaagtaatggaaaggtaatgggtgggtatctaatta

SEQ ID NO: 7402 - DNA, 1205 bp, Zea mays
tcttgcatgcctgcagtcgaccctgtttacaggattcatgcatcacgcttgaagttactttacactcaaggcaaacagaatcttgaagctatacaggtttgtctagttgtatctgaccagttttttaagagttatttttccttaaaaaattagtattgcagagagtggttttccatctactcttgtttaagctatgcttttgcatactgattaattggtgagtgatgacgtgatcacatgaattgtttcactaccgaagccttgaggacttataactaaatgggctgaatcatctatgccattctcactaaaaagtctagcttgaagcattgtgtgaggtgacctgagtaacatccatatcctagccatgatttgttcttttacctgaaaaaatagcaggtaagccccactgttaggatttccttaaagcaaaaggaatcaactgtacaacagaaacaggtagcctgaggcaagctgggccaaattgtctacaaagctctagccatgatttgtgatcccataggaatcaggttgttgccgtgacctactgcccacaactgacctggcctggcttttcgtgaacttggcatgttatattagctttctaacagctgtgggatgacaagcatgtttggagatttaactgcaatggtttgtttagctccaaatctgcctacaaagcttttttttgaaacgcaaatggcagtagctctgcctttcattaaagagggaaaagagttatagaacaaagatcatggatcacacatggcaaggtgggtaagttcttgagttttgcatagaaatttgtgattccccaatatagtgtgtgtacctgcacgtacatgtggaaggacgaaggattcattctccttagtttggtttacttctaagttttaggcaaggtgacagtatgaagttaagttctatacgtgagcaccagcgcaactaggatacctggcatttcatgcccatatgttaaaaccaaaatggcaaaattctataggcgtcctagtaggtagtagccctcatcaggcgtgcatcattgaagccaaattggcgtcggaaatgcgcatttgaagccctaatctatccctagattgcaacctgagcaaagaaacaggcgaggaatcaacagcaggtagctttgattttcattggtcacccgccacattgcaagcagcagcaacacttgtcgtccaagcagc

SEQ ID NO: 7403 - DNA, 825 bp, Zea mays
cttgcatgcctgcagctgttccaaagtctgatgacagctcaaaatctgaacgtagaaaatcacttggatcaaaaccagaaaaagtgcatctagtaagtattgttgacaggtcactcttgaagtatgagtatgtcaaatgttttatattatttcctgagccaacattttttcctgtttggtcctgaattgtctatgatttggaattctgactactcaaagctttagttgttattgtgatccgtagccaaagttaataaacattaatagctaacatcaaattacatgccttgtaatttgaacatggtgaactactaatacatctctaatttagagtttttggtgactacttgtacccaaaatgttcttctcttctctaaattataaatactgtggtgcaaagtttcaattatttaatagtttcaccatttttctttgagatcttatatattttgacacttaaaatctgaatagattgagttgaggagggcaaataacacagagatcatgctgacaaaagttaaaatgccactctcggatttggtggtaagaatgaggacagtatacaagataaggtctcactattttataatttctgacatattgccatttgccaatgattgatttctccagagtgcagctctcacgctagatcaatctaccttggatgttgatcaagtggagaatctcataaagttctgtcctacgaaagaagaaatggaacttctcaaggtgcacaacacgagattattgctttactggcatggtcacctcatgttttaaaattttcttcttactccttttttttgacagaattacactggagac

SEQ ID NO: 7404 - DNA, 891 bp, Zea mays
  unsure (1)..(891): unsure at all n locations
ttgcatgcctgcagtcatgtatgcagaatcccctataataggagcgcctatagcagcaagctgtgcccttatctgcaacataatggcgggctattagctcggtaacctttttattgatcaagcctcgagtgatgcatgtttgttacatgatacctggtgagttttccctgtcaagagattgattttacattcataagcagcttcttgctgtggccacccacaaccatttacattgtaagctttcctgatcgaagagcttggccatggtaccttcctacaatcgagtacctccatttgacagagatgccatctttcaatacagtctggttaagtaagaagaacatcaatgtaccaataaaggattccaatgtaacaaccaaaacgcagtacactaaaacaagaaggttatttaaaacttctggtggaagcattcaggccatgagtttatgcatcattcatcttctagagtttattaacaacaaaacagtggttaagaacaatagaaggcaacatgcacacgattgatgcagaatcaacgagttttagatataaactgctgactcacatttcactatcttcagtaatcagtagtggccacagcatcaacaaaaggtggtcagtgtgcacaactgcacatatgttcataaagagagcacacagtttcacggcacccaaaaatgaataatattcctgacccagatatatgcatgcttgaagtcaggacaacagtgccagcatgaaagcacaaaacgcatattggccgaactagtaaccatatagaagcaacaatttcagttcaagattaccttcagaaactaatctangagcgcgattaactgggcgcatataatgggtaatcgttcctgttgacacangtgctgtagtaagtgc

SEQ ID NO: 7405 - DNA, 863 bp, Zea mays
cttgcatgcctgcagttgtgccccatgaccaccaaactgcaaggaaacttgtgccggctggtgatggaaggggatcggcatctgaacaccaggaatttgaacggtaggtctaagagatgtaacattagggacagatggagatgggtgcacatctcttttcaattgcgatgtaatatggggattgatggagttatgttggctggaaccaacagcttcctttcttgctgactgctgctgtggctgctggggaacctgctgcggctgatgctgtggcggcagctgtggctgctgctgcaactgctgctgtttcagagctggttgcacaggggcaggtgtaaccttaagttcctccacaagtgcctgaataaggtatacaagcaaaatagaatatttttagagcactagcagatttagaacgcgtatcaaatcaataccaataacacatgcaaaaggaactggctgtgctccggaaggcaaattagtcatgggacatcaatatttttgtaggttctagcagtccaataaacaagcactgaaccaacaaataagaatacatacatcagaatattgtataaacaagagaagacaagatacctgattacgtttttgttcatccaaatttggaggagctgagcttgtcctggcaggaaattgctgtacaaaattttatagatgtaatgtaagtagaaagcaaaatgtaattgctaatacagagagcttcatgacccagctggagaaaaaaaaagagataccaaattctcccgtagcccattcatatttatactaccaaacttgaaggtaaattcctttggagggtcttcctgtaagaaattaaccccagaaagggggttatggaagccagt

SEQ ID NO: 7406 - DNA, 791 bp, Zea mays
catcgagttcggtgctgtgtactacgcgctcgtcgccccgcagccgcctccctacgcttctccggagcattttaggctctttcgggaagtcaccgagccttccgtcctgcgccggagggcgtccatcaaggggaagacggtgagggaggctcagaagacgttccgggtgacggaccccaaccagcgcctcgaggccggcacctacctgcgtgttcatgtgcatcctaaacggtttccaaggtagggtgggtgctgtcctctctgatctgctgcggtgaatgactggatcagcttggttgcttatgacttatgagcatgccccctttactcgatcgtgccacaggtgctatcaaattgactggaaatccagggtaatagcagtcgctgatgaatacgttgttcttgataaacctgccgcaacatcagtatgttcctctttaccttccactctctcatttgttggtggtttacgggctctaaatttcttagatagttcattgttcatgtcggatcatgatatgcgtgtctgcaacattgcccctccactttgttgaacatattgttcatgtctttaactcgatgtcgtttgagtcccctatgaattatgatattgatttttctttcaccattaggttatctgcacagaataaaattcacatccactaatatgagtatgtacaatgtactaccactgcaacatttgacgcagccagaagcacgagttcttggtgaagcaagttttggtttattgaatgttgtaggcaactaagttacaaatgaccagtcagacc

SEQ ID NO: 7407 - DNA, 764 bp, Zea mays
ttccatgacctgacatgctctgcatacatgggttttaagatccttttatccttctctttttgtgtttgctcttgttgggtctaatctctagcctactcgacttgcttgtaacaaaaaggctttattgatgtttgaaatgtgaaatgcgctttttgagaagttagtgcatataaacataagttcagggttgcattaactaaaaagaacagcatttgaataaagtcgtactattgcaacttcagtttcaagcgcacacttgttggcgtcatctaaaaagtaacttaacagtggtacaccagtccaaaataacaaatcaccaaaaataataacttcaaagaaaacaaaagatacaaagccacaaaggctaggcttttccatacggctaccgtggattccaaatgtaacagacaggtgcacgagttagtatttaatcagcacagattttccagctaatattgactaaaataattttatcagtcgacctagaagaatagaagatatcattgttacttgtgatttgtgaatagtagcatacccacttacccaggtagcagtgcgatgcaatatatcacaatatagtcattttttgtggcagcttatgtttgactagcccaaaataatttagcatcactccatccagtacatagcaggaaccaatagtaaaaataaaaaacttccaacaaactgtgttcagtccggatgacaccagatgcccaaaaaattttacagcaggtaaaattaagccaaaatagaataactcaatg

SEQ ID NO: 7408 - DNA, 757 bp, Zea mays
cttgcatgcctgcaggttgtccatggaaggtgaacttgacgaatctatcctgttgctctttaggtacaccaaagccctgtagtaacccaaacacaaattgtagacaacaaataaattactgttctgttggtgggcgcaacagaaatgtgtaaaggatatgctattttacaatcatggatgctggcaacattcaagttagtttagtactctcaccttaaaaccaactttattaccgagacaggaatgccagtctgatttcatatctttcagagcaacatggtcatgaggtctatattaacaatgataaggtataatcatattcagaaaaacctatgtgtagcatgataagatcaagataagcataggtagcaaagaaagttaccttttcgggcctgaaacacatggttcaacgtctgctaaatctaactctagataagatgagtaaactctttctgtttgagtctgaaactacagttctgtattagacatatgtttcctttggtatcagagatagtgacaacgatgctaacctcgttgtaatcaacaaacatattgttagctcgaagatatgcctccaccatctcaacctatttgtaaggacatcaaaacataagaaaactattggatcaagaaaggaatgtccagactacaatagacaggatccatggaaatgttttttgagaacaaataagcaactttaatgtgaaaaatggaagcaaaacctttttcatcacttctcctgtcagcttcaggtatc

SEQ ID NO: 7409 - DNA, 799 bp, Zea mays
cttgcatgcctgcagcatgcgtgtgcgttttgcctgtaaagtttccttcctttcttcaaactccttgacgatgatatctagattgcatttttactagtccggaaatgcaactgatatgtattagcaccttattaagtgtttgccaaaaaggtcagatgggatagagttaggaaatatccagtttaatccattgtgatatttaggtcaaatcatctacctgttgcattttatagctcagatcagacatacacaatagggaaatagtagcctcgaaacgtacttgttctaattgcaataatcgactgattttgttattatactagtcattctgctttatatatgttttggatttacatatcacaagttaccatgtcattaatgcaatttcaagaagcagagagaaatagataacatatattagcatctaaaagaaggtgctactggtctctgtacaggatattggcagtgaaaaaccaatttaagtagatagcttggtgtgaactggaatagtttagaatctacatttaagctcatgtctgtagatttcattaccatgagaacaagacttcacctcctacatcacagaactgaaattcgaagtctgtacagtgtttaattggtgtttgctcctcaaatatgctccaatcaccacccacattgttgcttgcttcggcccacaaactgctacatggagctgccaaatcagaaatacatgattcttacgtctctacgtggatatatatttcgagcagaaatagtgatgcaatgacgtggagcaaaccagctaacgaatctttct

SEQ ID NO: 7410 - DNA, 787 bp, Zea mays
cgctgagccggtttgaggactaggacggcgagaaggctagagcggccacggatgcgatgagtcctgtgcaagtaagtggctctttggagaattccttagagcttttcctcgtttggattcatcatcattgggttgctttgtttcatcttgtgattgctaagaaagagggcttttggcatacaaagagtactgcaaaacaaaaaaaaggagtaaagggagcctaagttatatttgaatgataataaggtgtatgccactttttgttcgagatctggatttctcatgctagactagatggggaccatattacaactgaacaatgcttgctagatgtgatttgattttcttgtgttctgctgatggttgatttcttccttgcacaggatggattgttgataacaaaacctccaggcatgaggtttccatcaagaagaaatgtgcctatgtctgttgacccagtgggccatctccacaatggcagcagtttcgatgctgtctcggtgtcaggttcagatgcaagttctgggagatatacccccaaaattagtgcgaccatgcacaactcatatcttcaggatagtagcaatgctctctcaccatttgccaacaatggcactgtgaggaacccattgaccagttcgggtgactggtcaggaagctcagctcctgatgctagtacagatgggtcaacgagcaattctggtgaggcagggttaagaagggaggatgacgacttggagaagctaagaagtgaaatagccactttaaccgggaaattggatgtctc

SEQ ID NO: 7411 - DNA, 747 bp, Zea mays
tgcagctccgcaacctcttttcttgcttgcacaagctgttgttcgtttgcactgaaagcagaagatacttgtgaagacaacaccttgaattcctcctgaagtcgttctgcggtagttgcattattccatcttatcttcctcagagaatcctcagccttaatggcccgttgctcttgttccacctttgcactcattatttctgctatgtcggcctcaaactttttagcctgtgtctggagttcattatccaagctctccacattggcctcaagatcacttataatagccaaatgagctgaacactcatattgcatccttagctgctccctcagttgtgtttgctccagcctcgaagatatgtcatggttctcttgctttagaatctcataatcaagtgcaagttgctccatttgcatctcaatatcctcacgatctttcttgtacaactcgatttcattgctcagctcaaggattttcttttcaagctcagaggtagagatgtcatcacgcttctttgccagtgcatccagcataagctcatcttccttctcttggtatgaactcgtttcagataaggcaattttgcgtccagaattatgcacatttgacagtgcatgctcatattctgcctcctgtggatcctcttgtgtatcctcttgcaaaatggaaatgtctctgttcttttgctccaacatctcatcaagatctttcacagccagaagcagctcagagttagattcctgcata

SEQ ID NO: 7412 - DNA, 817 bp, Zea mays
tggccgtgcacacgatggcgccgccgccggacgccatcgcgcgcgccgcgtgcttcacgcacgccgcggcgccccggaagttgacggccatcacgcggtccagctccgccaggtccatgtccatcaccgaccccgtcgggagcagcacgccggcgttgctcagcatcacgtccagccgcccgtgcgccgccaccgcgcgcgccaccgtcgcctccacctgcgcctcgtccgtcacgtcgcaccgcgcgtacgcgcaccggggccccaccgacgccgccaccgcctcccccagcgcgtcctgcacgtccgcgatcaccaccgtggcgccgctcgaggcgaacagccgcgccgccgcctcgccgatcccgctcgcgccgcccgtcacgatggccaccttcccgtccaacctgcggtcgccgacgaacgcagaagtgtcagagccggttgctgccgtgaaaccaaacaaaaataatgcatggacaccgccggccagcagcacactcaccttggcttggacatggccgatgcttgctagctactagcttggttagcgcgttgccagggatcgatggactcggcgtgagttctgttcatcatcgtcgtcatcatatatagtaaattggtagtactctatagtataaaaaaaacaaagtttatttaaagaatcgagaggacatcattgagcgtcgttaccctttactaaataaactactagttgaatatagctgtaaaatagtaatgaagcagatgattcatataaactcgtattgtctagggtttgatagagccgaacagacggaggagatgccgcgacagc

SEQ ID NO: 7413 - DNA, 828 bp, Zea mays
acccggtgaaggaccagcttcccagcgtgtcctactgcatcacaagcccaccgccctggcgtacgtctctttcaatatcactcccctcacctgggattgggacctctcgattccaatgctggagtagaactactctgtgtactgacgttgatgtttttccacatggtcgctgtgttgatactgatagtggtcctgatttctacagtactaggttatttttgacttgtttcctgtcgcctgaccttgaacatgcagctgaggctgtcatccttggattccagcactacattgtgatgctgggcacatccgtcatcataccaagtgctcttgttccccagatgggaggaggaaacgtgagtaaaccaatcacctctacgtgttctgaatccaagatttgatagccatctagtctgtgaactgaattgtgatgccaataaagctcaactatctattgctgtgcacctcctttctgtctgctgctaggaggagaaggccagggtgattcagacgctgctgttcgttgccggcatcaacaccctatgccagtcattctttgggactcgcctcccagcggtgatgggtggatcctacaccatcgtcgcacccaccatttccatcatcatggccggccgttacagcaacgaagcagaccctcgtgaggtagtcgagttctccggtaacttacctccatcgtcacggcctctgttccagtttcttggttacagttcacaaggcgctgctctgctcactcgtgtgcagaaattcttgcggaccatgcgaggaacacaaggcgctctcatcatcgcgtcgacaattcagatcgtgctg

SEQ ID NO: 7414 - DNA, 844 bp, Zea mays
atcagtggctctgtggctaatctctggcatctgaggctcatagatacgatcggaacttttttggaagaaatccacacagtatttctctttgtcttcttcgtcaggtagctcgcctctggataatttttcatacaactctgctttcttttctagagcagcatagcttgcagaaccgtctttcacggctttaagctccagcttatccctgtgcacaaagcgcaacggtagaggaggcatttagttctggtcaatactcaaaactcaacagcatgagaaaaaaggacttatggctacatgaggctgaaaacagaagacagttgcttacttgcattgaaaccttggcagctggaaatgcagtataaagaataaaaaaataggactaattcgaatggaaatacttaaactgcaaagtaatagaaaattgtggccagggtagcagttaactgcacggagaaagagaacaccaccatattacttttcatataaaaatatatttcattctatcttttgttagtttatttaaattctaaactgcaagagaaaactggactgtggtttggataaacccaaagttatatgacatagctaacaacagctacattgttttgttttgagttggtaattactaagaaaatgcttaaaaagtgttcacttccaattcaataaacaatgtgaatcacattccctgaaatcatcaagttgcagagtgatcaaggtcaattagtgctcgaccatcctattggagtacacgaatttacaaagtaacaagcatataacaatgatgacgaaatgcttcttttcctaggtttctatatgctacataaaaaaatctttcgtaaaccaa

SEQ ID NO: 7415 - DNA, 794 bp, Zea mays
acaaagatccagtaacacgagaatggacacttgagggaggtgcactagttcttgctgataggggcatttgcctcattgacgagtttgacaagatgaatgatcaagataggtatggtataccatttctatttggatgtcctgtgatatttaaatttctgtattactaaaagtgtaattttcttttggttgtttcagggtaagtattcatgaagctatggagcaacaaagtatcagtatatcaaaagcaggaatcgtcacatctcttcaagctagatgcagtgttattgctgcggcaaacccagtagggggaaggtaacttcagttccatgcatgccatgtagtaccagtgcatggtgttaagaaagatactgaatgcaatcgtccttgatttcacaggtatgattcatcaaagacattcactcagaacgtcgaattgacggatcccattatttcacgtttcgacgtcctctgtgtggttaaggtttggagctgttattcatgtctgatataatttgttccatgatcagttttcaatcactactgatctttaatttttaaaaatgcaggatgttgtcgatccatttacagatgaaatgctcgcaaggtttgttgtagatagtcacgccagatcccagcccaagggggctaaccttgaagacagggtttcaactgatgtggatgatgatccactggctgctgcaaggcaagctgacccagatgtatgtatcctgatacctatttcaaccgaaagaacttcttactctgtttcgtggttataactgaacgttatgttg

SEQ ID NO: 7416 - DNA, 696 bp, Zea mays
ttgtccactctagcctgaagctcttggtcaaggcgaattgagaagggtgctccatttccaacaacttgtaaacgatttaagagtgcaatgttctcttgtatgagggacccaacttcaagatgacaagaacgaatttcacatctcaacttttgctccacccctgtcagtctaatcagttccattcgcaatttcctcattttatcactgtcacactcaacaaatttcttgtctaattgagctttgcatccctgtcttagacttgtgattgctctttcctgttcattacatgttgtttgtagtctggcaatcactttgtgcaatgctttgttctctccctccttgtccttcaagtattccctggtgtggtccctttcctcaacaacctcagcaaaacgagcatccttatctactgaggaattatggagcttctcatgctcgtttctaagtttctctagatcatcatttaatttgttgttttgcaattccaaactagcaactttggttgaagcttcagccttatttgcttcaagaaaggcaacttctctttgaaatgacacattctgctctgcaagttctctcacccgttcatgtagtctcacttcttcagattgaaatcttgatagtttgacagaccaatcatgtgaccttctgtccatctctctctccagtgtagtttgtctttcactcttctccttc

SEQ ID NO: 7417 - DNA, 785 bp, Zea mays
ctcctccgccgccgctgcggcgccttcttcgtcgaggagcaggagcaggagggccacgcggtctctgtccccgttcaggggcggcagtggcctggacgccgccgccgctgacgacgtcgacgacgagtcccctcctccgtctccccgagcctcctccatgatacgtggctgcggcagcggcagcggcagcaggaagtggcggctcaaggacctgttcctcttccgcagcgcgtccgagggccgcgccaccggcaaggacccgctcctcaagtacaccgcgctgtcgtcggcgtcgttctggcacccccacggccagccccagaggctaagcagcgcgtccatgtccatgcgcaagggaagagggtcggcggcgtcggccagcggcgacacgccgttcgccacgatcaaccgggcggccgccgccgaggacgtgcggcgccggacgaccaccaccaccaccaccacgccgctgccgttccaccgcaacagcctgttcggctacctgcgctccaacccggcgatccacagcatcagcaggaagctggggggcagcggccactccggctcgtcctcgtcctccagccgcggaggcaggcaggcagcaggccgacatgacgatccgtacgcacgcatgaggcacgacgcacagcaccgcaccaggaatctcgacggcgatgatgcagaaatggccgccggagggagggaaagcgcgttgtacatgtacttgtcccctttcctctttctcttcgctagtacgtacatttttgcagcgtacgtattctttc

SEQ ID NO: 7418 - DNA, 823 bp, Zea mays
tcctgctgccctgctcgttactagtccggactggagcctgtcatgcgaggccacattccatgcatgaggggctgaaggtgtacagaattgatggatcgaatgagtgttcacagaatgggaagttggggatcgagcaagggttctgcgtggaaaggggaggttgggcatggtgggatttttttttactgtgggacctgcctaatgtcctactagaaacagtatctttgtggcgtgttacttaactaatgccatctgcaatgggtcccacatttaaggtttgtttggtcgtttcacattgcggctgattggatggctgggcgcgccaagcctcgatcgctggagcctgggcggtcgggtacgcccgtttcagtcgtatggccggatgcagccaaacacccttaaaatctgttcatgtaggctatgtctcccgcatgcagacaaccaaacacgtctcgcacaaagtcaacgcatgtgatggcttaggacgagatagtgcgggcaaccaatcagacggattgtgcatgccctaatatggttttagttcatgtctattcactttctcctgatgttagtttgaaaagtatctcagcctgcttggcctggcatgcacagttacttggatggtttgcttgagatcgaacaatgacaattgttgtgctgggagcgtaaccctgaccagtttgtgcaatgcacctgagtaatggttctggctactctaacctggtttgctttggccatgtccagaatttaatttgctaggtgatgatgttccagaccactgaaagtgggcagctgaattagggtctttgttggacctgcatcc

SEQ ID NO: 7419 - DNA, 777 bp, Zea mays
  unsure (1)..(777): unsure at all n locations
gcccctgcaacgaccacagcatgcaggttcagaggagagaaacgcatccagtccgggcgcagaccagagaaagatcgacgagagcaatgaaaccagatggatatcaagctaggagagagggggccgggcccgggtcattgcgtggaagcagcacacatactgtccgggcctccgagcttgtggatggcgtggacgaagcagtggtgcagatcgggcgtccacctgaggcgaggcaccttggacctgttgtactgcctcacgccgccgctcctctccctgccgaccaccgtcgtcgtcctcaccatggccagctcnnccagtctcagctccaagaacacgaaccagccggcaggcggcaaccggcagctatatatttggtcacttcacatgcacgtttaggcacatgagcgaccatgcatccatcagccaggctagctatagcagtgccagtgcaacgcctgcctctctaacacctttaattttgccactagagagaggatcgagggcgaaaataaaaagagtactctacgaatgagagtgagcgagcatgcagtcggaagtgttaaattttgctgtgtactcgtcctcctagactagagtgggggggggagaagacacacagatagagagagagagagtgtgcacagcacagtgcagtgcagtgcagcggcggacaatgcaagagacaaaaggtcggagacaaacggggtgtttcagatgcggtcagagcatatggctgcccgtaggaggggataatcatgagaatggagcagaggt

SEQ ID NO: 7420 - DNA, 696 bp, Zea mays
ttctgctcgcgctggaaccccttgttgcacacctcgcacacgaacctgttggtcgccataagcgtcttgggcgacagcgcgatcacctcagcgtcggggtctgcttcgtcatcgcaccggtcgatatgaaatcaaaacacaaagtctgctggttagctaatagtatataaccctagtatatatagcttttattatttgcaaaagaagaggaagaagaaatgctatacatgatcggtcgaactgacgcatgcatgatatgatggacagcagggaaattaaaactaactttgatttcagtgaataaacagtaaaagcatgcatgggtcactaatgaggatatagatgatcgtcagtcagcacttgtcgtggattaggatggacgacaatagcacatggtttttgtatattgatgactgatgcgttttattaattatttcgagggaattattgttctatgtgggagtaattaatactagtatttttcttataagttagtcctgcatacatgattaagaaacgatggtgggagctagtagtgatggcggtatagtaatctgggcaagatatttgtttttgtttcagctttctctcggtgggtgtgagcggtagtagagacaagctacgagagatggagagagaggggaatattttgcaagaaaatgtttttttttggggggaccgaagggtttgcaggaa

SEQ ID NO: 7421 - DNA, 953 bp, Zea mays
cccctgtatactctagatgcgacctgcagtaaagattggagacactattccaagtagtttgtttccatatgatatagtaacctatatttttttcttactggcaatttatatcttgttgaaaatgatagaaatttatgcaatggactattcactattctgtcctatattttgacatatccctggattctttcccccttctggtgtgtatatgtataacaagtgtccacttttgtgcataagcttctttaggagtgtgtgtcctggaaattttcctttgtcaaataactgttctgcacttctgttctgcttttacttttttatatcatctatacttgcatgtttgcaggtggtatattccagtaaatattgttgttggcgcagtatcgggctctttgattggatttgttgtggcatctatcatcagacctccatatccatacttcaagttcactgttatccatataggaataggtaccacttttctgttttgaaaataagttttatttttatctatcatttgtttatccaataccaatccaggttctttttttgcaggaaatattggaaatatacctctggtcctcattgcagcgttatgtcgtgatccttctaacccatttggcgactctgataaatgcaatcaagatgggaatgcatatatctcatttggccaatgggtacgccatacttttctcttttctcggcttgtacatgctcatttttactcatgtcagcatagtgaccttgttgtttaaagattgccacttatcacctagactatgcatacaattagctgttgaggttattcactccgtgagtcctttatatgttgcagggttggggcaattatttgtttacacattatgtaatcaaaaatgctttgttccacccaccaagaaaagaccctttgatggttttttgaagaaggatggaaattcccaattaagggcatc

SEQ ID NO: 7422 - DNA, 828 bp, Zea mays
cttgcatgcctgcagtgccccatcctcataaagtttagatttttcatccagattaacctccaagtaagatatcagtttgactaaacggcgtccaaatggggtcaaactcttcagatactcctgatcctcatcggtgccattatgtaaaatattatgatctacagctccagcaccactgtcatccaaaagtatgtcaagtgtgtcacagtaaacgaccaacaacctgagatagttcatcacatagcgtgtcattgggtggatctcaccagccatcatgggtcgccgcgatgactcctgttgtaggaccttcccaaactcaagaagggtacccttgaccgcgtcaccaagcctttcaagaaccccctccagatcatggatgacatcacccccataactcccaaagaacagctcctttagttcagggatcacctcagcaagcgcctcatacatgtcaaggatccgggaaagcttctcgggcgagcgagtgcacacagagacagcatccccaaagttacggatctgcatgatgcagcacttggtggactccacaaagcactcatcccggagctcatcggacacagcaagcacctggtcacagagccggcgctcaccggtgagcaggcagcgaacaactgtcttgaccccatgcacccacttcttcatcttgtcattgagatgcttccactcgatgcgctgcacctcgtcgatactgagccgttccacaccgagcacggtgaggcactcatcgagcaggtcacgccggatggcacagtatacctgcgcgagctcactgtcataccccgcgtgcagcatccggtcagcgatggg

SEQ ID NO: 7423 - DNA, 747 bp, Zea mays
ttgcccctgggcatggaacggcgctaggggtgcctgagggaaaggcgccggcatcagggtcggatgaggcatgtaggttggagtcgatgtcatcagcttcatctggtgttctaaactctccttctccaatttcagcttctgcttctcatcacgaagttcatccttctcggcctggaatttaaagaaacaacaactgattcatacatattggagatcatagagggggaggaggtcagaaaagaagtaactttgtgtccttaaaaaaatccagtggagtagttaaggcctagccagtcacattgaacagtacaatatactgtaatcaacagtctggtcaaatcattagcaaacttggactctgcataaagggtcatggtggattgaaatttacagaactacaaatgcttccagagcttgtgatagctacttgtatccatcataaaaaaatgaaggctttagacctgtcattggataccctaacccattccacaaattcacactcatgtgatttaggttgggtatgggtaactgggtaagtaacttgctacccctaggatcaagggtaagtatggctgtatgggccccgccatttctacacgtaatcgcctttcctttccttgcagccttccaacataattgtttctgaaagatatcacatgaaccgcaagccccctccatatcagcatatctccattggatttcctttgggcctccattattttaaaaggccccatgcccaaaggggcg

SEQ ID NO: 7424 - DNA, 758 bp, Zea mays
actcagctgtccctttgagatacatttctattattttctctagactagaacctgcttctgtatgaaaaaaaaaactcggtacttctgtgttggttgacataaatttcttctgaaactctgttctcaaatgctctgaacctgataaaaatcccttgtttgtgctaccttgtgatttgttagccttgaaaatatctgtcaatactctgtttggtcttcatctgtgctggtacctccaaatcttgttcccagcagcaaaaacaaattatatataaaaaagcacgtttaggcactatagacgctaggccaccagtggcctagtgcctatcggatttttgaacatgacaatactccacagatatgaaatcaactgaaataaatataaaaatttacttttccctgtgcacgcatccccaacaaggaaatgatgtcttctaaaattgaattgtttttttcagcttacatgtgatgaaacttccaaagaggcaataacaatgacgaccttatactggcagtagtgttacttcacagcgttccacagataaactagagctatatctcatgcttcgaaacctataattcaccctaccaaacgtggtactatgtcatgaccttagtccttagagatcaaatccctccatcaaattcacggataggacacccaacctacatttatgatcaaatctatagatacttagatagtgcacccaacctatattttattgtcggacactctatccctttaaagtcctactcggtct

SEQ ID NO: 7425 - DNA, 775 bp, Zea mays
agcatttccttcttcaattttcacactgatggtcctatcataataaatcatcgaggcacctatctgaccaaaattcacttatttctacatgcagttctaattcacgagtctataaatcattcttcccctatgaagatcgcacctcagaccatacccagcggccaattctttcgctggtcagtggccacaaatacattgggaaaaaaaagtaatagtgtgagtacggaaaatgactacctcctatctaatcaaatatggtagaataatttggtcacccctccgtgacggtaaaacattcaaactaaattccttaacccgaaacaaacagatacgagccggatctcactaggaatcgtgtagagggcgatgagaaggacgaaaaggagggggcggcggcgagtcgagatcgccagcggccacctcatgctaaggccggggcgcacgcaacagtttggccgtggggtgtgggttcgtagctcaggagcacctatcctggtgccgcgtcgtagcgggctggtcgacggtcgggcaccggcgcgcgcctcctcttcctcctcgtcctcccaaacgagagaaatggagctctgattcttctcttttcgccttcgtcaatgaagttcgtgggagaacaaagacgccctcattttagaactacgccttccaactcataaagcccattgactctgatgatcctcaaagcccatttagatacaaggcccaacaagtagctagcccatatgattgcctaaatgacaaatcagaaaaaggacgagac

SEQ ID NO: 7426 - DNA, 804 bp, Zea mays
cttgcatgcctgcagttagtctggcagaagcttttcctatagtcattggaaggccctctgaactttaacatgcgatactaaaacttagtcaagttaattagagcacggtagaatcttacattatactaataagtactaaaagttttatggacgtgcaactgatcagaattaattatgtttaatctctattatttttctaatacactactacaagatagggactgtaatctatatacggttttgataaagttgtagaagaggtcgaaagataaataaaggaaaggcaaagcagaaagaagaaaaagggcagaggcaatggcgacatttcgtcagatttctccctttattacacactgtcagagtaacagccagctaattgaacttttttttgctatgtccgccagatacaatacaagatcattttccgtgtcctataccgaattctgctaatattttttgaaagtgtccttcgacatcgtaggtccatgccaagatgtcacagcccacgacgactgcgctccgttggagcagaacctgaaagcatcgcagtcctagctaaaacatcttatcctgagccgttgacgatatatagagggccagggcctgccccgtgcatctttacaaactacgagtgaattgactccaagtcaaagggtgccagcaaatcgacctgtttgtcttggcacgtacgaccgatgcctttggaatgatcctaacctacaactacaactggcagtggcagcattcgctgccgacctttggctaccgaaaaaggaaaaattggtcagatcggttgcaggcttc

SEQ ID NO: 7427 - DNA, 779 bp, Zea mays
gctagcttgcatgcctgcagtctgcattcttctaaggccatcagtgaggaattttcgttccttggtggcagatgggttcctccagctctaaagtggacaatgaggagcccgtgaggcgctccaaggacaggaggcggctcatgaagcagctggtgcgccgccgcccagagcttgcagctgcgcacattgcatacctgcacgccctccgcaacacaggagccactctccggcaatttgtggagctggagtctgctttgtcacagcagcctccggtaggccttgcggcgccgccctcgcctactccacagtcgctgccgcagccgcagccgcagccgcagcccccgccacctcctgaaccctcactgccaccctcgccacaccccccgccgcctctgccttttagtccagtaaccaccataagaaagatggagaagagggatggtgaattcccaccaccaccaccacctctggttttgagtccaataagattaagaaaaagggatgatgagatccatgtgggtgattttaccgatgatgacgatgacactgacagctgctcaactcctctaccaccacccctgccacccggtatagattgggaggacttggatccttacaacgttcgccccttgagtttcccatctccatttgctgacaggaacgatgaagaggtgggcctcgcaggttgccatggacaatggtcctgaggtacacacagaatttgatggagaggaggatgaaagtgtgcttggcattgtggatagggtccatgtgaattc

SEQ ID NO: 7428 - DNA, 815 bp, Zea mays
tgcatgcctgcagtaaacagcatcacaaaatccgcctgcaatgcaaagggtgccaatatataagagggtgcatgcacagaggtggagatggaagcatgcaaacatagatcaagaaaccacgcaatggggagcagcaagagagtgcccccgtaccttctgctggtgctgctggccgtcggagccgccgcggtgagcgtcggcatcctgcacaagatgagggagcgccgcgtccttgctgtcctcctccaggaacgcgaccagcagctcatctccttccaagtcctcctcgaggtaccgggtatgcatgactcgttttcatgcatccgccgcgttcgagaatttttttttttgcatgaaccacaattgtgcttctaataggtagagctgttgcttgactgaatacatgtgttctctgtgcctgcactttttggccgactctgtcagtagataatggataccctgcttttgtcacccggagtcctggactattaactactccatccgttttttgctagatacataggctttgcgacgtacctagattcacaataaaattgatgtatttagaaaagttaaaatatcttaaagtttaagacagagagagtattaattaagtactctcaaacaatatgccaccacttcagtttactccctttattcaacgatttacaagcaagaaattaatgctcatagtatccatctgaagttctgaagaacatagttccacctgtatgaagacctacaggacacctaataaaccactctatacaaatacaacactgtcaaaaaaggaatcttgtcagagtgtactacaa

SEQ ID NO: 7429 - DNA, 813 bp, Zea mays
acccgccgatccaatatagtcgacctgcagctttctcagaggcgatcacatgcgccgattttatggcaccaacatgcttggtcagtggaacgggccggatgcatgtggtgtcctgtactgtactaggccggtctgggcccgcactgttgatggaccagacaggcccgcccaggatatttctggttggatgtgcttttagtttggaggaagtagtaataaaatggatgctccacttggtgtgccgtgttttcctgtactggtgtgtgacgtgttactgactcaaacaatgcactgtgttatttactcacatgtgatgggctcggtgacgatggaggagtggtggtgcgagtggtagcgcgagtagaggaagtggtggtgcagcgcccggtggaaccagtagtagaggaactccacgggcccggcgtggagcagcgccatcgccacggcgccgtccgacctccacgccggcatgcgcctcgcgctggggatcgccaggtagccaacgtagaagagcaggccgttgaggatgatctggtcgtccctgcaatgcacgcatgttcgtcagccggccggtccaacgacagcctagctagctattgcttgctttgctccagtagtacttctcaccagccgcgctcccggtcgacctggtcgaactcgatgccgcggtcgacgatgcggtgcttgctgcgcgcccgtctggtagcgcgcggcgcttgtccagatctggttgtgcacgattccgcagcagcagcgacgggcaggatgaagcccgaaggccaaggtccaattgtttctctagccccagggccg

SEQ ID NO: 7430 - DNA, 748 bp, Zea mays
aacagaaagctgccgtcctccaaccaatcgggacccccaatgacgcctttttggcctccagatttgtccgcaaatccagttcatcaatcagttgcttcgccccgcccgctctctccagatctccagtacacacacgcgcgcgccatctagatagaacctcagcacacctgaacgtgcttcgcaagatcgcctgcacgcccagtggcatgcagtgataccctcctcctctcctccgtctcaatcctgttcagggacgctgcacgcctgcctgcctgcctgtgcctgcgcgcgctggggggctcactgtcactggtcaccgtcaacattgcatcaatcttcgagcatgtgtgtgcatggcagcatggacccatactgtacatttacaatgtagggtcccgtccagctgcacccgtcggagtcggaccggagagtggttgcaagaggcttccttccttcgatctctctgcacaagaagatgggaggaaggatgagagtgctgatcattccaaatctcctctcatttatgagagtcaactgctagcttctcaaccaagctgcaaatacagtactgccgcctgataaaccaggtttcgttatcacggtcaaatgtgtgcactttaatgtcaaaccaaagaaatcagcgctagacgggactacgatttcgtttggaaggaactaggatttcattttgtcaataacaggatcacaaactgtttacttgttggtctctggtggagtgttgttatgg

SEQ ID NO: 7431 - DNA, 817 bp, Zea mays
agaccggggatggggggggtcctgccatcaaacaccaccttgttcctatgaatccagatcatccaggcccctaaggcaataagagaatccaatcctttcttccccaaactaaggacctgagctgaagatctctcccaccagccaaagaaggaagcctcagcttgctaaggggataagctgtgcagcccaaacttcctcaagaggttataccaaaaaaactcttgaaaacacacaagagaccagcagatggttgatgttttcaggttcttggtcacatagggggcatctaaccaggtggttcatacctcttttgccagcctattagcagtccaacatttgttatgagccaccaaccacagaaagaaacggcacttgggaggcatccatgatttctagatccttttatgatggtgaaaggagcttgaaccatggaagagaccagcacatgcagttttagccgagtaaagaccatctggcgctaaggagaagatgtgcctatcctcaatataaggatgcaacatcaaatcagataaagcttcccagaggtgcagataatcaatcaaggcacccacggtcagagctcccttaatgatggtgaaaggaacttgaaccctggaagagaccaatgtatgcaatttttaccagatggtcttttaacaagactcccgcagttaactcccccagatggtcacagacacaaccacagcaggttttctcaaacttcaccgaaaggaggtcgtgcaggcaaataaaggctaatccggacggaattgcccccacatgcaggcacccagtatgcggcctggaagccgaaagg

SEQ ID NO: 7432 - DNA, 828 bp, Zea mays
agcttgcatgcctgcagaactttgcgtccattcgggagcagcaggtcggagggttcactcaggtctgttgaaaaaaaaaatcgaacatcaaccttcttacttcctggttttatggagctgtttctccttgtctcattttttggatcaattttctctttgtgtcactggatataggaacataaacaaatcgagagtataatgaactgccttgatactttagcacggacatgtttgatattggattaacaacttcagtgaattgttcgagcttgtctataatcacttgtcgacgtaaaaaaatattatcacataacctcttcaggggatagaaattagtatttctgaagctggtattcattttaccagtagtttcataggattctttcctaccatttcctatattaagaaagttcttctcatctaatgcccgagagctctaattgtagccggtcctagtattcctttacaattttaaaattgtaacttgcgtactaagttcaggcctaatttgtttatggcttacttattttcatgattggacgcaggttggtgcccatggcactggtgcaacattacctcctgttgatgagcaagtcattagcatgaaactggttacccctgccaaagggacaatagagctgtcgagggagaaggatcctgagttgttttatcttgctcgctgtggacttggtggcctaggtgttgttgcagaagttacccttcagtgcgtagaaagacaccagcttgtggaacacacatttgtttcccatgcagatgaagtcaagaaaaaccacaagtaatgttttgtggtgccagtctttatgtagc

SEQ ID NO: 7433 - DNA, 841 bp, Zea mays
gacgtatacgcaattgaacgagagacaattacagtcggctcctacttgtatgcttgattgagaccgacctggtgtagttttgtgtgccagactgtcaggagagaagtagtgtcgtcgaattccccacattttcctttgaacttaagtttttttttggttcaaacaaatcgagcaaatactgttgcacgtgcgatgtgatatgagtgcaatgcaatggtttgctgcatccttaatagcaagaaaaagtacaggttagctggttaggtggtgttagaactaaatggtgttagaactaaatactgttgcaatcgatcacctcaacaaagataccaaatgtacaccacccgtggcctagctcaactatatatcttcaaggaaatggactacagcggggagaggtatcgctgtggacccattcaatttggctgcacacgtaccaacgcacccagattaaaagtgcgaatttaagtgcaatatttgagacatatatccgtagaatgccatatccacagaaaataataatcagcaacaacaacaagaagaagaagagacttatcatgcaagttttccccaccatatcactctcgagaatttcttgcgatatccaaaaatttctcgagagaataaaccagctcaattcttgtcgagagagaaagagttggcaaccggggccaaaaatgtgatcgcgtcaaactgccgcgcgcccctttttgctcgatcgatcgatcgatcgagtgtgtcttgattagttagttcgttcgtagctaatatatatggcttttgtgctatgagaaagacattttttccagcagcagcacttattaatgtagtatcaaaatag

SEQ ID NO: 7434 - DNA, 918 bp, Zea mays
agcctcgtcacgggggagttctcctatgctacctcacatgccaagttcttgatgaaggtggtggcctcatcgaatcgaacgaagtattaagctggcagctagatttgcttcgattccattgtctcacgctcatatcatatatgcattggcacaggctgatgtgaaccatgacggcaaactgtcgctggaggagatgctagacgactacatatccttctacagcaccgtgtatatggatgatcattacgccagtgaaggtgaagtcgatagtgattcccgcgacgagctatgagcagttaaggcaggacaggacagcaagtcggaggttctttactttcaaatacactaggattttgcagccaaaggaaatgggaaatgtacaatcagctgcaaacatcaattttgttcatcgagaccagctgcctatctattctacagtttctttatataaaaaaagctaaacatataacataagggaatgcgtttttttttccaaaaagaaaaacttgtatcaattttggaactctgtcgcctccaaccccatctaacatttaggtcccacataaacacacaaacggcgggccaataaatacaaaggaaacaaggtacaacaaggaacatgtatgattgtagttccttttcactatcagtaacagaccattgacgtaaagcaacacatgtatctcccagcactaacacttcaaccactcgacttttgagttttgacaactagttagatgaggtggataaaataaaacagctcatctgatttcccaatcgtcatagcgggcgccacgcacggcacttcacacagggcacaccatatgttccccataaataaaaaacacattgaccaaatgcggtacccgcttagagtacagctaatgtaagggagcatgttggttgtcagttcgcccg

SEQ ID NO: 7435 - DNA, 775 bp, Zea mays
ccaaagaaaatcctcttgagcttgaccttccagcgatcaagctcggtgagcacgaagacgtaaccgaggaagccgtgtctactactttgagaagggcaatcagccgtctttctactctccaggcacatgatggacactggcctggggattatggtggccctatgttccttatgccaggcttggtacctctttcaactctacttctacagtgatatgttcaacttgcttacttcacttggataatcttgcttaaccttgcgatatgtttaagacgaaattgtgctatcttgctttctcacatcttatgcctcacaaattttttttcttgcatttagtgtgagtaccatttggatgcctcctaaaatagcaactagcaaattgtggcaggcatctcagttttagattatatggaaaactcatgtttcatgtttcctggtttacagaacagctactaattgttattatcctttatccagatcataacattgtatgtgactggagcactaaacactgtcttgtcatcagaacaccagaaggagatccgtcggtatctttataatcatcaggcaaggattcagttctaaatttgtcaaccctacagtgctaacggtgatctaattttgtcgctgcaactgtagaatgaagatggtggctgggggcttgcacattgagggtccaagcaccatgtttggctcagcactgacctacgttactttgagattgctttggaagaggggacccagaataagtggaagaatggaagcaatgggaaaaa

SEQ ID NO: 7436 - DNA, 778 bp, Zea mays
aatcgaaacaaatatgaggccaatcaaggcatccctggtagtcggttaaggtagaagtgcaacgatacactattttttccctttaggcttgctgtccagggaatgtttcatgaacaccaactgaagttgatctgtacgaaatcaagtatgttatcatcttttcttatgaagaattgagaaaagtatacaagtccatgcagatggatgcacaattcaaccattaaacacgactctataagctgcacaaaataaaactaataagttaccgaaactgaaaccatttgttttattatcatttggtattgacatgcttaatttttaaaatgcatcacaatagatatttgtctacgcgattgcatgcatttgcacagtaagcgacttaagacatcattgtaagcagcctgctccgtgtgggaactttgatataagataattaagcagatgagatttttttttcagtctgtacagtgagctttaaagcaggtatcgcaaatactacgtaagacaatatcaggagcgccaattaacccaacagacaaacaaacaaacaagtgtatcttttttcttcttgagaagcagcaaccaaggaaaaaacttaccacagaagcgatcttggtaatgatgagagttcctcagggtttagaccttcacgggctgcactgccaccactagctgacaatgttttgtttttactgtcagcctctgacactgagtcaaccttgctagtaccatttacacagtagttctgcaaccacctatcggtctcccagaggacgtg

SEQ ID NO: 7437 - DNA, 844 bp, Zea mays
aatcccctgcccaaggtcgtgtctttttcatgactcttctgtccaaatcttgtttcaccgtggcgtccctttcttctctccaggaagagcaaaagggacgaaaagcagccagcgttggcaagcagccggcccatgacaaggttaggacttaggacgcgtgctagctgttcttgcgctctggcatttctcggaggctttgatttgatctgggcactgtttgattgtttaggaaattcgccgcctccttggcgagcaagggccaacctgaatgtcagccgatcgtagctgatccagaacccgaattttgtcaacagaaggaatcagtaggcgatggcaccgttgatattgacgtggaactctacgagctggtcgacggtagtgatagtgacatcgacatggtacttgtacttctaatttgtgttgaccctcaaaaagggatgggttttgggcatctttgtcatggctctgggctctggcttactgtcatgtttcgcaatgcagggtgcgacagagaacaaggacattatgaacgaagatgaattgctcatggatattgacagtgcagactcggggaacccgcttgctgcaacagaatatgttgaagagctttacaccttttacagagaaaatgaggtgatctatttgtcagacgatgtttatcatgtttctttttggtagatagtctcaaatcatgaatcatgtataacgtgcttataagaatgacaagctccttgcaaaactgaataaattagaccggaaacatgtaaggatcgttctgtttcaaacaaaaatcttaactgcgatatggtataatgtggaaatgcctgccacgaggtagctttat

SEQ ID NO: 7438 - DNA, 838 bp, Zea mays
ttgtttgtactatcatgatcatgactaggtttgattagggcctgccttcttcacctggctaatgattggtattagatgccagccagggtacctctacgacccgggcctatatatagctgtcgccgtcatgttttgtttgctggacgccggcgctgctcgcgctacagagacacatcaagactttcaggatggatttggtgacaagtggatcacagagagattatagaggattgagtggaaaataaactaattttaccctcaattccctctcatcccctcgtaaagtcgtaatacctgatcaccaaatcagccctcatgtctgctcctctctccttctgtacctcatatagcgtgagttttggggttgaaaatcggctccaacagcaaattctgaacttgatgtcgccacctcaacttctcatgcatgagttgcatagagaattatgcaactactgcctcgccaatgcatgagttacaagaaaaaccgtctcgccatctcgtccagcacgtcgaatctgttgtcgtgatgattgcattgcatggaagcagacagggaagatcacggcgggtgcaatcaaaaaagaaaggctgcacgcattatcaggttaacatctactgagtaaagagaggaataatgcagataaatcaaccgctcgcttttccttttttttttctttctgaaaaaaggtgcagttcgatcatgagcagagcggctgcatatgaactgccactttaggcttacctttcagcgctggcaaaggaatgttggcgaggaagtgagtaattggaatggtgtttgtcggtcaaggtctgggggccgggtctaggtctgaaacta

SEQ ID NO: 7439 - DNA, 690 bp, Zea mays
cacttgcagaccggaaaggcaagcattgtcatcatgcaccgtcgagggcgaatgtgtttgttaacgattctgtaggatttgtccgtaattgtacaatatacaggtcaagcgaactagtcaaatggttggtgcccgtcctaggaaactaaaaatggttcccaatgcaccgaggtgtgtcagtgtgttcgctaaattgtatcgtcgctagtaatggaggttggagggctcaactcagacggtatcttcaacagcttattcatacatatattcaaattacactccgtgcaatttataatacaaaacaataaaaaaacaatgttttcagtgaccatataagtgcaatatacaatagttcatccatatgatcaccaaaacaccgttttgcaccattaattgtactgtttgtagaatatagtttaaatatgggtacgactatgtgtaagttgctagagaggttcaacgagagaatgcataatgacgagatatccacaagtatatggacatgacatgacacgatttttatacccgtatttagtttcttgtttacagtcatgccaatgtttcgccatttcttgacggcacatcaagcgttatatgaaggggtagaatataatcagggcagacaaaaaagcatattgcaaaagacgttcaaggtctaacatcaaattttattctcgccgaacagttccg

SEQ ID NO: 7440 - DNA, 846 bp, Zea mays
gctgctaaaacagtggtagagttaactctacaacccctttcgctctaatagcttcacacccttcagaattgagaaatcgtcaaaaggcaacaaacgaacaggaacaaacacgcagagcaaaaggctccttttttttccccctccaccccattattcgaaaacaaaagctaaacaacagtagcacttctcctacgtatatatcgatatctgacgaataaggtggcaggcagttccaaaacggcaccaaacaaaactcctccgaaaaccaggcttcttactccttttttttccaacgtctggaaatcccttggaggaccggatggaacttggccagaggtatggtaaacggtgtgactgtgaccaacacctatatcctgcgccaatcaagtcgtccagcatgtcgatgctgacgatgcatatgcatgctgcatgcatgtacatcatccagagtaagcaggcaggaccgaagtacaaggaaaggggagggggaagaaaaccgaataatttcacgcggcagcaaacgaacaagatgaacccacatctccttgtcatgcacgaacactgtataactctattattgcaattatatacacgcttttaagtaggatgcctaacatgtcctatacatacccgttgccttgtccttttttttaaaaaaaaaattgggtgtactgtgtataagcacaagtgttgtgtttaaagccagagggagcgagtagccgtgtccggatcatcagggcagaggcatcaggtggccgggcctaaaatctacgcacccgtacaggtattactcgatcgattccgcgcgctgcgttacgtttctttcctctcccctcagatatatta

SEQ ID NO: 7441 - DNA, 565 bp, Zea mays
tcaaagaactaaaaaaatctcaccatgtgctatcctacatctggctaagcttttcctgtaacctaaaccgatttaactttgtagaagaacatcacatcaagtgacctctatctccatgatgcgatcgtctctttgaagaaaaaaacatataggctggaattggctaccttggccagccagttatccaagtccctctgcaaaagagaacaaagacaacaaaactgtcacggagttgtatcttctggaaaattgaacagtcacacgtgactaacttctcatgcattcaaagcagattatcactccatttctgaacaataacagtcgcttatggaaatttgaatcgtctctgtttgctagaggtgagacaggagatttcagcaggggtaagcttgcataatgagtagtttcatcagaaagatcagcattcctacactactacataccaaacgatatgagcaaccaattcgatgcccattctagaaattaagaatgtctagccaaatcgagtgatcatgtgttagctgatattctcatagtgaagtggaaatttctagccgcgctgcct

SEQ ID NO: 7442 - DNA, 835 bp, Zea mays
atgcttgtactctagttttgcatggcctaacctgtgacattgcatcaacattgttggaatagtagcggacataaagccattgaacataacctttgtagttgcagcttgtcaagtccagttgaccggggattttatgattctactaacttgtttgagagaaggggattagagggaattgagtggctattcaaaattgaatagaaaggttatgtttttccgtggaacaaaccaattctaaaattgatagttactgcaatcatagctttaaaagttttgtataagagacgtcttactaagggggtgtttgaatgcactagaactaatagttaactgttaaaattagctgatacatctaaacaatctagctaatagttcggttattagctatttttagtaaattagctactagttagttagctaattcaattaacaatttttagctaattaactattagctctagtgctttcaaacaccctaaataccttactttttttttctacggagaagtggaaggctatgcgcgaattggacggtaacatacacggtcttatttttatgtcgggttctagtagtactgtagtaattatcatacgtccatatatattttttggaaagatgtacgtccactatttcaatgtgaaacaccagtccagtccgcattgaccgcatatggactatggttctgctcacacattacacggttttttttctgaatgttactgaagtacagcactctgttttccttggctcactgatcagtttgatctctaaatctgcaatatgatctacaatgtgaatgatcaataatgaaaaaatggtccctgttcggtttag

SEQ ID NO: 7443 - DNA, 844 bp, Zea mays
catcttgcatgcctgcagcagctcgagggtcaaaatcgctgaaaaatgagggaagttgcaattcaagtacctgttaaggacagataataaacagcttagggcagaacatttgataacgtagttacatgtactttacaggagcaagcaggaatacgaaaatcataagaacaaagtaacaaactatcacaaaattggtttgtacttctacagtagtatttataatgagaaaccaagaaatacagggattgaatcatcttgtaacttaaggaaacaaggtaggaggaaattctgattggcatgcttcagtctatatatgtagtttctgtttcatgtgatttacctccagaaggttcaatcccatgataatggctaaaccggaagcagccactgggagcccttgtcctacctgaccataagcctttccagcaaaagaagcagcaacaccaagaatggctaaggttgttgctagtcctagtgaaaatgcaattgaattcccaacaacctataattgatagaaaagccaagtcaatgcatgtatcaagggaagcccccagctagaataatcaggtttcaacattattcatagccttaattagtcaagtaaatccttcagtgaagataactttgtggtaatacatatcctaacagataaatagcaatatcttcaagtttttccatggcataaagaagtacaattttccactcatcttaaattacctcggatcggcctttcccagagccaaatgcacctaaatgtttatgaagaaagcactgaatcagagtaattaatgatgatcaattctgggcattttttttaacaatcatttaaacaaaacaatatagt

SEQ ID NO: 7444 - DNA, 846 bp, Zea mays
gcgtagcatgagtttgcatgcacgtttggcttttgttcgtcattgaggctggtgcacttctataatgggttcacgatcaaagaacgaagatgacaaggctcttgtcttgtgccaggaaagaaaacgatttgttagagaagctcttgacgggagatgtgcttttgcagctactcatttcgcttatattcagtcactgaggcacacgggatttgctctgagaaaattcgtagagcctgaagtgccgacagattcgtcactgttcacatcaacatctgccactccagagcctcctacaatcatgcagaaaccgatgaccatatctccatccctttcacatcatgctagtgactctttctccccagttccctcaccattatcttcaggacgtttccatgtcaatcatatgaaagctgggggcaattcagtgacaactgttaaggagaaggtgattgaacctgtgaccgcaactctcgaaacatcatcccctgtgcgtggacaagctatccatgacctggatgacagttcaacgtttgaagctccccctggaacaccaccatgggactactttggccttttccaacctgttgagagccagatgtcattccatgatgacaaggaacttggtcatgactttgagaatgatgatgatatcaggcgtcttcgggagaaagagggaatcccagaacttgaagaggaactggagaagtctcctgcttatcctgattatctaaagcggcgcctaggacaggagaaaccttcagatctcaaagatgttgagaaatctcctatgaatggtggagaggatgatcttgcattgtcagaagatgattttgacaattcaacatc

SEQ ID NO: 7445 - DNA, 889 bp, Zea mays
acaaaaagtgatcacacggcaatgagaatactattgtttccaaaagtgcctccagcatctaagtatatgatactactacacaactaacatattattacaatcaatgaccaaacttatacgctccataagtaccaaaaaataagtggaactaaacaaaaattgcatagtgtcagactaacaatacattgtgctacaatcatttataggaacttgtgccgtatgaggggaaggaacaaaatgtagttattaaagttaagagtaaaataacttacgttgaggaagagggacttcctctctgcaacaagcaaataatgttgcaaaaaagcctgatgctgttgatcccggcgctgcaccaaagtatcaagataactccaatagtaagtacaatataacagattaatagatggagtgacaaaaaataatggacactagctgaagctacagcaatgctaagttgctaacaagtaacaaataaataggaaaattccatataatgatgtgcacacagcccaaaacctttctactttccatctttctttttgaatcaaaactcccaatgcgtgagttatggaacagtaatgtaaagaaacctactaaaatacaacctttttcttctggtagtaaagggcggaaattgactttgtctgcttcaagcatccttgggacttctttcccagaatcagatgccttgataaacaagatctcaatctccttaatgcaagagtttaagtccctcgccacattccttacatcatgtaaaggtttcttgaatttcccattaacttgaaacgcagcagttgaagatgaaatttctttcggaggacttgtaacaggcgtttcgtcactttcatacatgctaatgtccagtaccctcatgtcatgtttttgt

SEQ ID NO: 7446 - DNA, 806 bp, Zea mays
ttgcatgcctgcagcttcttttcttggcctccttccggcttctcgtccttgtagtcttgggtgagcttttattctcatttttcgtatgcgtttatttcttctcatgtttgcagtatttgagcgggctggtttgaccgtcgttttgtacccgtacttcctcgaagctctggctggtcatttgttgcttgtactttgtacccgtgatgcgcatttactgtgtagtagatcttgctttctttgtgttgcttgaatcgggttaacgagtttttttgtttgattttgtggtttctgttgatgctaattgctgttctcgtgctgaatcaggttgagatcccaggattcagactggtgccattcgatttgattttggcgcggggtactttcctatggccgcctccatcgcggcctcgcccttctttccagggtcgccggcgccggccgctcctaagaacggccttggagagcgcccagagagcctggacgtccgcggcgttgcggcgaagccgggagcctcgtctaatgccgtgagggcgggcaagacgcgcgcccacgctgccgtccccaaggtgaacggtggcaagtctgcggtggcggatgtggaacacgagaccgtaactgtaccttcgtcggtgccgaggactttctacaaccagcttcccgactggagcatgctccttgctgccatcacgaccatcttcttggccgccgagaagcagtggacgatgcttgattggaagcccaggggggcctgacatgctcactgacacttttgggtttggccggatcatacatgaagggctcatgtt

SEQ ID NO: 7447 - DNA, 794 bp, Zea mays
aaggtttccttgacaaataaattcagtcatatgatcctggtgctgcaaaagtccttgagagtgtattcaacttcaatctttcaattcctcttaacttcttatttgattcttttggagggaagatattagttatccaggtatgtacgtaataccatcaacaagcctcactcatcaaataaaaagtcatacactcgcatatctactacacttgccaaatctggtgcttgctgatgtgtgggagtgtaatcttgtttatttgctttatttgaacaaagggtatgaaagacccccttacaaaatctgaggcatttgtcaccatgctccgagaacattgcagcaaggttcaaatcagagagttaaatgcaggtgcgctgctcctcttttctctggacgccaaccaatcttaacttttttttttttacttttttccttataaagaattatgtggctcatgatattataacaggtcatgctccacatgatgaagttccagatgaagtaaataccatactatgtaaatgggtggagcagattgaagttaagccagccctggagaagaccaaggcaatataggtaacatttagaattatggacaccctatccattggttgattgtttaacatgatcttcaggagcaccttggtacattttcagtgacctaccaaaacttgtgtgattaaagcattgtgaattgttagccctatacaaattgtgattaaagtattgtgaattgttagctatatacaaaacttggtacattttcttttcagctgatgttgagatgaacatacatg

SEQ ID NO: 7448 - DNA, 758 bp, Zea mays
aaagtcgacctgcagcagctacgcagctcgtttctttggttaaccgcgccggtgggcaacacgggaaggataacattaacaatgagtcctcggtgccaacacattgacaattgagatcgatgcttaacctgaagaacttgccaaagcctgccgggcgccatcgccatgttacacagaaagtgtcaaaataagttcacgtttacctaaacggcctgtaaactattatgaaattaattacaaaaaaaaaacatatctcttgattattactataaccgaaccgatttaaatttagacgttaaataaattttgtcccacgcatctgctgctagaccaagtatgatgttctttattgaaaggcaaaaacacaatgcgcggcacggcggcagggagggatgattagattagctcgttgagacaggcagaaaaggtgacagaaatcttgttgtcgtagtcgagcccagctgatatatacgctcacgtccaccccaaccagcaacgccactagcgtgagaacgacttcgcctgcatgccgatccagctccccagcgataggcagttatttacaggctcacatctccagccttcatgcgttgcgcgttctgcccactccccacaggccacagctagtgcagggcaatcatgcgccgggaaatggcacgtacttgttgtattgtagtatcacaacaacaaaaaaaacagctatgtatatagctaggccggcatgctagtgctactgattgagcgaccaagtttcgacg

SEQ ID NO: 7449 - DNA, 791 bp, Zea mays
ttggtccgaagcgtgcgaggagaattcacgcctgttgcgggcgggcgcgcctgcgctgctcacgcccggcctggaccccgacggttgcgagaccgagagcaacgtcgacgcgggcgcattctgcctccacgacgtgtctgccgccggcggcggcggcgggcgcaggtcctttttcggcgaggcagagggattgaagggccgggcctgggtcggcggcaaccatgggtggctggcgaccgcggactggcgctgcgacgtcgagctgctgaaccccgtgactggcgcgcgggttcgcctgccgtccttcgccaccattcccggagtcgaggtcgaggtcaacttccacgtcgtcgcccgtaccgctggtggctactccttaggcaagttccacaagatcctcaaggtcgcgctgtgccggacgccgtcgcacgctgacggccacctcgccatcgctatcttctccggaggtctgctggcgttcacggcggccggcggcggagacaaaggcgagtgcaggtggacggcgttgaagaacgccgcggccgatgtctcgtacatggacgccatcgccctcgatgggaagctgtacgccgtggacgagctcggccgcttgtactcttgggacatcgacgatggagccatgacagagcccacggtggttcagggaccggagaatgacgagatgagccgctatggcactgacctgtgcgggttctacctggctgcttccgtctgcggccagcggcttatgctcatgtgcatacacggctacgaccgtcgcccgtgcttta

SEQ ID NO: 7450 - DNA, 826 bp, Zea mays
atcttgcatgcctgcagacgaacgccaagctccagctggcggcgtacgtcgccctgttcctcggcgcggggctcatgtcgttgctcgccaaatgggcgtagaacagaacagattcgctacccgtcagttttttttttctgccgaatcaccgtcagcgagaatttcggtgcgcagaggaagcgaggaaagaaggcccggatgtgatgtatgtaagagcactcccaactctgctccgtggtttccatagctgccacctagtcaaggaaccatttatagaaactaatcttctcaatgcaaatggtagtttctacgcatagaacatatttaatgacttcacaaaagaagcagacttcgtttctcagagggaaggggaagaaaacgaggatggaaaccaccgacggggctcaacgctattttggtcgtttccatgctcttttcacaataaatctcttgccacatcatcaaaaagctgatatggcagtctaataaattctataaaaaccatatgagctggagagcgttgggagtgctctaaccgagttctagggggatgaggcggcggagtagtttggccttcaacgatctttggggctaaataatagctgtacatacaaagggtcgattttttttaggggaacgggcgaacggcaatgcacatgtctgttatcccggatcctccttttttgcatgaaatttcttcatattcccctgaaagaaggcgtgactgtttgttgataagtgagatctgttttgactaacattcgagatgctctaacacgtagctctatctaactcacgactgcacgcctttcattattattagaaa

SEQ ID NO: 7451 - DNA, 799 bp, Zea mays
gcatgcctgcagtcgtcctacacggtggtcgaccacacctacgacgcggtggtggtgggggccggcggcgcggggctccgggcggcgatcggcctctccgagcacggcttcaacaccgcgtgcatcaccaagctcttccccacgcgctcgcacaccgtcgcggctcaggtgagactacgccctgcggcataacgtttcctgctactctagctgatgtttttttttttggtgtgtgtgtgaaaaaaaggaattcgttgggaggttttacagctgccatgcagttacgagtgcagaacataatgcaaaaaaactgctgtatattttaatcaaaattagttccagtttcccactgactgttgacgtatgactaatgtatgtatggtttgccatcgaattacttttgtactccagtccattgttgtgccagttatttctagttaggattttttccttcgtttcatacttttgtataaccctagttcacattgataaacgagcaacagcattttaatttgtttaaataggtctaaggttgcacaaaagttcttcagcattgatgcatggtatattttttctttagtaccatgcactgctagtttgtgtgatccagttgtgctctaacatgcaagaacatgttatgcagggaggcataaatgctgcacttggaaacatgagtgaagatgactggaggtggcatatgtatgacactgttaagggaagcgattggctgggtgagctacttcatcatgattttaccccgcatctagtttatattttagtggaaaggaactggcatatt

SEQ ID NO: 7452 - DNA, 772 bp, Zea mays
gatttttgagtatatgaggagagacgctgcttcaattaggatacaaaagcacgtgcgtgcgcattctgccagaaaagcgtacctgcaaatatatgaatcagctacagcaatacaaacaggattacgagcaatggcagctcgcaacgaacacagattccgaagagagaccagggcatccataattatccaggtttgcactattatgcctatcatgatttgcaaatggtttttgtaggaaaaacataatgaacagttccttgaatcacagactcggtggcgccaacacagagcttatactgcttacaaacagcaacagaaagcttctttgattctccaatgcttgtggagggcacgcattgcaagaaaggaacttcggaaactgagaatggtctgtagtacaattatgcatcttcaacacaagcacaccattcattgttaatgctcataaagtaagcataaccatgtgaacaggaagcaagagagaccggcgcactgaaagaagcaaaagacaagctagaaaagagagtagaagaactcacatggcggttagacgtcgagaagcgtttgagggtaattcacttgatcaatataagtagtttctgtagtgtttagtatgtcacttggtcccgaatgactttatctactatgtcttgccggcaggctgaccttgaagaagcaaagagccatgaaattgaaaagttgcaatatgcactacaaaaaatgcaagaaaatctcgaggaaagcccatgcagcaataagtaatgaaaaagag

SEQ ID NO: 7453 - DNA, 866 bp, Zea mays
atcttgcatgcctgcagcgtgttcagaatcaacttttcctgctcaatcagaagacttaacgcttagccaaaaaatcactgtaaagtaaaaagacaccatgcaaggatacaattgcagaacaaggagaagacagcatgcaagggtataaaaaaagacagcatgcaagaagacagcaaaacagggagaaatcatccgaaagattacaattgacacgttccacttatgtataaaggacacaattgcaatttttcagcaaaagatccatatctgctgtatgctgatgtagcatacatggatctatctatgatcattgtacgtttagataatgcagtattaaagaaccaggcatgcattcagtatgagtgcaaattgcatttagtgggattaccatttctagaatttgcccttttgtgtaggcacggtcagatatcagcacaaggtcctcaacaactggaacagatacctcctcatatttacaagcgagcagcatagctgtgactccaaccagttgtagcttcttccttggaaccacttccttttccaagaatctatctattatgtttaccataagaaagagcgtctcatccatcagttcaaacttgtagtgaacctggaaaaatgaccagaaaaaatattaaaacatgctgtttcagatcagaacaatttgtacggtccatgcttttgtacctcaatcagccagtcaatcagaattgctctcatctttgagtttatgtcttgttggctggacatgtaatctggccttacacaactcttagcctgcataaaggcaccacattggtaatactgaaaagataatagaagctgcataaaaaatcaagataggagaagcctaagtctttgtgaat

SEQ ID NO: 7454 - DNA, 789 bp, Zea mays
agtgcagcccaatgactgttcaaagtgtttattaatgtacattgcaaccttattgatagaaaatctgctctgtgcaatggaaatttagaaattctgacatcactggtacggggaaagactcaaccaatgtttgaacatggttgggactgaatatcttcaatgacactttggactgttgttcctgtttttgcaacatgtgactcaaggaataactcatgatgtggtggattaggtcatatacatggtaatattggtgaaaataatcggtacgaataagatgaaatcaatggcctgtttaggttagctgtaatgattttagcaatggccatcaaacatgtcacatgtttttgctccatcagaggacatagcagtgtatcagaaattcaaaatacagagttgctaatctagtaatcttactccacatgcaggatggaaacctcccatatagtccttatgtttatttgttctaggtgctcaatatgtatcatgttattcaattggttgttcaatattgacactacatttgggttctgctttagggtcaatatattctactctccattatttttacttcccgtctttgacatctatcccagaaaactttgtagagaattaacaacatatggttctctcattgtatcctttagcttcaacttgttaaaaaacttgtagctattaccttctcattatattgctttattagcatggaaattattttgtgtaccaattatatactagttatttctcttactgaaatgtttaccctgaatgtggcctgatattctttct

SEQ ID NO: 7455 - DNA, 843 bp, Zea mays
atagtcaaaggattgattcatgcatatctgcaggtttccatagtcctgataggtttcctttagcctcctttttcacccctataaatgtgctgctgccaactctcataaaacatagtacaattcctccaaacctccttcacttacagcgagcaagacgccttagcgttggaccgctgcctagacacctaggcggcgccattaaaacagtgggttaaagtagtcaagagtaatgctaaagtccacaaccatggtggatggaaagaagtgaaagtaagatgatggaatcaatcagaatagtattcatattcattcaggatataatcatgccagttgctcgagaaattcagcatacaatatgcaaaaaaatgtggaagaaggttaagtccattcaactcagactactggtattgacaagtaacagtccaaagcaaaagaaaataagaggtataccaattaggaataagatactgaacaaaagtgtgcgactaacaatgcttgacatagaaaaaaaaaacaggtgagatttatgtatcagtacaactaaataacatgcagttcaagcttaagtcccacctggtcatgtccaaagaaattgtcaaccagacaatttgtaacaagtataaactgcaaacacaactacacattaacagccaggttaaaaattagcatgctcagtcagtagtactaaacctaatattcagtgaacaggcggaaattagaaatatggtaccagtaccagaccaccagttgcaggtacaaagaagcgaacccctaaactgtgtctttaattctagtaaaagatgatgtaatatacccatacatgatttgtaactcgtaactctg

SEQ ID NO: 7456 - DNA, 757 bp, Zea mays
actagagatgttgttgccctgttgtcctctagatgctaaaagaggacagtcaaaaggctcttgctgtcctctagatgctaaaggagatgttgttgtccctgttgtcctctagatgttaaaggagaagatgttgctgctgtcctcgcagtcaaaaaggagccgcactccgcctccgcaagcgttctggacacgcctgatgatgttcgcagcctctccctcgctaccaaggaccatcacccacatgtagagggagaggtcgtcgacaagcagcaagtagtgtcgtcctcctggtgtgcctggtgtcaccaggccacacaagtccccatgcacgagctcgagcctctccttggctcggaagctcgactgccggggaaaggggagtcgtctctgctttgtcaacacacaagacatcgcagaactgctccacatggtcaaggcaaggcaggcctcgtaccatcttggcactgagccgcttcagggcctcgaagttaaggtgcccaaagcgcttgtgccactgccatgcctcgtcgtctcgagcagcaaggtggtgccaccttcatgttgaggatgtaaagccaatttggactcctacgtatggcaagaagacaacgataggggtcctagatcctcatgactcgatgctcgacctccacgcgtgaaccgttttcatccagctgtcccaagctaatgatagagttcctcaacgtgggtatgtagtagactccggtgagcaaccttgttttacccaaccccgcgg

SEQ ID NO: 7457 - DNA, 808 bp, Zea mays
tggacatgcacttatgatgctttttttttcatttcagatccatgcagctggcttttcaaatcccactccaattcaagctcagacatggcctgttgcactgcaaaaccgggacatagtagctattgccaagacagggtctggaaagacgctagggtacctaattcctgcttttatacatctaaggagatgccacaataatccgatgttgggtccaacagtattggttttggcccctactcgtgagcttgcttcacaaatacaagaggaagtagttaagtttggtcaatcatcaagagtttcctgcacagtaagttctaacctgatatattttattatggccttatctttccttgcatagaataataaatcattgatctgaaccaattgtagtcctgagactatgtccacattttttaagttttgtaagacaatgcatagcttgtggtggtgcacttccatttttaggtgcgtgtccgtagggataaacaagtcaagattgcaagaacaaagtggtgaaaactgaaagagtggacattagaagtcttcaaggaaagggtcatcaaagaggacacttggaaggaagaagatgacacaaacgtgtgggagaagatgaaaacctgctttcggaaggtggtctctgtgaagcaactaaagggagtggaggcaaagctaaggatacttgttagtggaacgagaaagtataaaggggctattaaggagaaaaaagaatgctatagacgtttgtacaatggcaggaagtgtgggacaacattagagaaattccaatgtacccaaaagaagacccgca

SEQ ID NO: 7458 - DNA, 868 bp, Zea mays
aagctgcacaacttgtggcagagattagtgcagccgggctacagcttgatgctggtagttatgatgctcttattgatgcttccatgacagcccacgatttccagtctgcatttgctcttttcaaggacatgagggaggcaaggctaccagaacttaggacaagttatcttactataatgacaggcttaacagaaaacaacaagcctggcctcatggcttccttcttggactcggtggttgatgacccgagaatagagattgctacacacgattggaattcaataatacatgctttctgcaaggtcgggaggttagatgatgctagaaggacataccgaaggatggtattccttagatttgaaccaaataatcagacatacctctcactcatcaacggttatgtctcaactgagaaatactttagtgtgctcatactgtggacagaagtaaggaggagggggattgaattcaaccatgagttgattgatgcctttctttatgctttggtaaaaggagggttctttgatatggcgatgcaggtgattgaaaaggcgcaagagttcaaaatatttatcgataaatggaggtacaagcaagcattcatggaaacacacaaaaaactgaaagtggcaaagctaagaaagcggaacttcaggaaaatggaagccctagtggctttcagaaattgggctggtatcaacacataacatcgcaaccttgattttatcaacctgtcatgtgtcatgactgaatttatgatcttcagaaagctgtagcaagcgctatggatctttagagatggttaaagtaaaacaactgtttggctgtggtaaatttgcattttgcaacaaggttagataaaaattgg

SEQ ID NO: 7459 - DNA, 795 bp, Zea mays
cttgcatgcctgcagcgcgcgggcgctggcggcgtgcgtcgtcggcggcatcgtgctgggcgcgtcggtgctcgcgctccacctcgcgggcgggcccgccgccatcccgcccctgcccctgccgccgcccatcggcgcgcttctccgtcgccgccgccgccgccgccccgtgcgcgtctacatggacggctgcttcgacatgatgcactacggccactgcaacgcgctgcgccaggcgcgcgcgctcggggacgagctcgtcgtcggcgtcatcagcgacgacgagatcaaggccaacaagggaccccccgtcacgccgctccacgagaggtcctggtgtcgatggtcttttccgtttcaatatcctctatcttactttcgttattgtagtctctggtgatagtgacgcgaaacgtaattctagacttgtagcgtgcggttgtgtaacgcaggttaggaggagagtgacgtttttgttttccgtagctacctggccatgacccccccagtttcagcagtaattcaccagtcgagcgctgtttgggaattccattgtttgtaagagtttactatgcacttgactgctccagaaatgttttgctctcaaccggtttcgaaaaaatctctctttcatcaatccaagtctgcaatctgcaaataaaggaaacaatcccgagggttttatttatgggttctttttggtagttatagtataggttcatccacgaattgagttatggccttaagggtaatagcactagtgtttatgttgtcgctttcataaaggaggcactt

SEQ ID NO: 7460 - DNA, 840 bp, Zea mays
cagtgttggtaatgtcatttgtgtcacttgttgtcatcatgtcagttcttgcttcttttctgtttgctcgaaactgccgacttctacgccatggagttgataatcacccaccttacgtcaagaaacaagtggtggaaaagtttccctgctcagcgtacagtgctccctgttctagtgaagataatttccaggaagcttgtgcaatttgcttagaagactacaataatggtgatatgcttagacatctcccatgcaagcatggtaagagcttgagatattttagtacttgctatcttaaattattgttgctgatcggtagttaccaaagatacggaggtgctcagccatataactgttactttttttttctcagtgataaatacaaatttaccactacaatcatatatatattgaatgaccctgatgggtaggtgcatattttctctctttttgcataatccatttgtttcaaggcagacaatgattttggaattaacatcatgatatccattagtagcaagtctgctcaaaacttttcatttcttatagctctcccactatcttatcttcgatattttctctctttttgcacaattcatttgtttcaaggcagacactgattttgggaactaacatcatgatgtccattagcagcaactgtgctcaaaacttttttatttcttatagctcttccactatcttatcatcgataattttatttacagaattttacaagatctggattgattcttggctcacaaatggggcatcttctgccctatatgcaagctagaagtaacgttgggcgggtaggcacactttattacctgatccaaggct

SEQ ID NO: 7461 - DNA, 805 bp, Zea mays
acaggaccatctgctgctgtgaacaagagaggacctgacctgcatggggaggaaaagataaaaggctggattacggaatcagattgagatccaaaacagacgagtgcacaaaaaactaggttggtaggagaaaaatcaaagtataatattatattaagaaaaaactcaattaaagccccacctaaaaaaggacatagaaatagaagctagcctccatatataggtgtacaataggtcgtgccaagctaaccgtgggctcacttccaggcccggcacgcctaacctatcgggttggcacgtttggcccatagcccgtcacaattaccattagacgggccatgctgtcctgtttagcacgacgacctagctgcccgctaggcctatcgagctgttcacagcccgcttcacagatcacagtgcaagactacaactctgtaaatgcaaatgtgcaatatacaaagttacaaaccgagacactaacacaaatggcagataagtaaatgagtagcgagtactgaatataaattcacttagctgttgacctattgttcacggttcaccacttcaacctatacacagcactaagtctacagcagagagcagattagcagacacagacacagagacaatcacatagattagctgttttcattacagaacaactgaataacagaataagtacatgccgcacacaaattgctttgatctaccatcagccatcacacaagttgttttcatcacagattcacagtccacacaccacactaccacagacacacacttatgagttatgatttaaaaaccc

SEQ ID NO: 7462 - DNA, 807 bp, Zea mays
gttatgttctgccgttcaattcttgacaatgtgcctcattcctttatgcttaaggtgtaatatgaggttctaatcctgtccgttgtaactagtcaacagcatactttaactttaccacatgttcagttttgcaactgccagtcatttctaatgtacttatgtatttggattgtctggggcggtgaaaccgaactgttcaaaatgccatttatcaaaaatgtggagaagtctagcattgtctggttcttgtcatgcaggtcactccatacccagtacaagaacagtaattttgcttcaaagctttcatgtaagattgacttgtgatgtactaacctgactagaactttgctacctttaaaaggtgcctcattgttcagtccaaacaaaaaaaaaatcagtttgttgttatgttatgtgacctgttgatcgtcgctgacaaaaaggtctcagcaaggaccagctgagcttttgtaattttctgtttccctatgatcgatccatcgttccaagatagcatggactttttcgtgcgtgaaacatgttatggtatctctcctttccggtattttttttgtgcactgcctctacctgagaagtcggagcaaatttcaggatggggctaaaaaatgccactcgttgttcccctggttgtgtgcacgtgagatggactgatctatggagtcggatccttgtgtaggagccaagagagctcaacgaacaagtaaagatccgacttatagagggcgaacccttatgctgcacggggccaagaagggctagctttcgtgatctttctcagacagggct

SEQ ID NO: 7463 - DNA, 768 bp, Zea mays
agttcctttatagttgtcgtctgatctgggtttgaagcaactgcattctcttttatttggttgatatggctctctttctccacaagagctgcttccaattctttctgcgtgttggtaagatatgtcgtggtagtttctgaatccatgagcttgtttttcaattctgccctctcaatacttaggacagatgttttggcttccagttcgtccactttcctcctcatctctttgttaatttccttttctttctgccaaaaacaagacagtaatatttggttgatgaggtgtttttgaataacatgctggatagataattcatagaacacaataaaaataaaaaggcagatagaatgctctaaagtgctacagctattgcagtttacatcatcaagtggactgtacttactggcagaatagtttcagtatttacttgcagaataagaggatgttcaattaaatatagcgacttaggccatctccagcggatcctctatatcatcctctatttcaaactttactctgtaaacagcgtcaaacagtgttatctacaattccgtgttccctattttatacgattcaccaaagacaaccttagttgcctacagataaatttatgtctgcaaatagtgtcaatattgaagtcctctcaggggcgatttattatgtggactaccttatgactgcatgattctatgtttgatagtatcttcatgctttgggtatggaaagattttgcatgtgcaacactgtagttttgttgaatccatc

SEQ ID NO: 7464 - DNA, 764 bp, Zea mays
tcttgcatgcctgcagtacatggagcagctgttcttggtgtgcctgtgaaagctacaataaaggaggtaagtgttcatgcagtcttgaatcttgatgatgtgtcgctatgatttttcaaatagaattacccaatcaatcgtaggcttactttttgctaagctaccatgatccatgtaatagcattctggatggattgtaacattccttaccacttatatccccttcaggccaatactaattcttttgtagtgaaaactcttgaccggaaaactctctgggaaatgcaaactccacaggtaataatacttttacttctttctatattttttgttttctcccctgctcccacagacccccccccccccccattttgcttttgagggaccacaacactataatagtgtcttttctgattgtaggctatgaagcccaatttactcagagatggttttgagctcgttaaacggttagttttggtcttacctctgggcaaatcaaattgatggtattgttatacactgcttatactgcttagttctctatttgatttaattatgctatcgcagggatggccttgaagtcactgatgatgtatccattgtagaatatctaaaacaccctgtgtatatcacggaaggctcttatacaaacattaaggtattctagaataatatttgttatttgaactataatgttctgaactgcttagtttggagagagccgtgaaatgtgaatttattgcaggtgactacgcctgatgact

SEQ ID NO: 7465 - DNA, 807 bp, Zea mays
agtcaagagcagagtctcgttcaaaggctaaggtcccccaagacgaagaagagagtggtgatgacgatgaggatgaggaggcagacgagcacaacaataccttgtgtggaacttgcggaactaacgacagcaaggaccagttctggatctgttgtgataactgcgagaagtggtaccatgggaagtgtgtcaagatcacgccagctcgagctgagcatatcaagcagtacaagtgcccagactgcaccaacaagcgggccagggcatgagcggcaaacatcggcatcgggcgacctttgataggaaggaagaaactacctcctggcttcaagatccctagatatggcgtaggtccctagtttacgaagtctgcattttcatgtgttcattaatatatctgctgattagctgttcgacctagcagtgtctaaaacgtgccgtgtgtcttctgtgctgagtgttgacatggggcctcctccctccagcctgtaaacgctgtcactgaaggtacctctcaactgaccatccttcattgttggtgtcgtgcagtgagtagtggccgtactctttgttcccagttcctagcatttgaattgctcaaatgcgtaccttgctgagtaaggccgttggaaaatgacgaatagctgcatttccgtgggtctcaatgttccccaaagggcaccaccactgaaccattttttttccttgaggaatctccctgttaaccactaaggcccctttggaacataggaatttaataggaaccatttgagaatttcataagaatcagatcatttttacaggaaa

SEQ ID NO: 7466 - DNA, 801 bp, Zea mays
aactcacaagtcaatgatggttatcaggaacaatattgtcgtggggggcattacttatcgcccttatgcaaggtaatgctgccactttagttacaatttgttatgttggcattgtatatttgttgtgcttaatggccaattcaatatattctatatgtgctctttctgtgtgaggatccaatatttttttgcaactgaaagcaaatgtctcccaactgacaccactcacttatgagaaaatgttggccaatcaagatattgcgtcgtaactttgtacttattcaggaaatctattattttgatgataattaaaagctggcaagttagaatgtaggttgcaaacatttgcatgcttttgtttatcctgcaatatctctctattatgctattttttcttttggaaatcatagccagagatttggagaaatagcgttttgtgctatcacagctgatgagcaagttaaaggctatggaacaagattaatgaatcatttgaaacaacatgcacgggatgctgatgggctcacacatttcttaacctatgctgataacaatgctgttggctattttgtaaagcaggtatggctgcctgaccttttaccttatataatctatttctttcaatttcttgtttgcttgtatcagtaactgaaagacttcggaaactacatgtgtgatatacttagtacaccttaacctcacacaagagatataagtaataactcaaaatacttgacctctttatactttaaaaagttctggagtatttgatgggttggattgaatgtcatgtattatcaa

SEQ ID NO: 7467 - DNA, 851 bp, Zea mays
  unsure (1)..(851): unsure at all n locations
agcaagagaggcaccacttgggccagcagttgcaagttcttgatggtggcttctttgttttaggagcatcataaccatatagtgcctgccgtctgaaaacacatccagtacccacatagatgggcccttgaataccatccaaacctttcatgttgatctgtatcatgcaagtgttagaaaacatatgtgacatggacaataaaacgaagagcttaaggtgtttgttggaacagggaagctgaatcttacatcaaaaaagacgacgttcctgttagcatatcgatcatgacggtcaataccatcgaacctctgagggaactgtacatagcacactttcttccccaccaaaggatccatcatgaaacacatagcctcttttatggccttgctattgttgatgtagtgatcgcagtccaagttcaataggtatggagcatttgataagacagcagagacacggacctaccaattatgaacacaaaagaacaacaaagcatcaatcacacactgttattaggttacaagaagaatgataaaagacatcaagtgcagagattttaccagtgcattcatggcaccagccttcttgtgatggttataacctggcctcttttctctcgagacataaacaaggcgaggcaactcatttccttccacatcgcgaccaccactttggccaaggaatacctgttgacacagaaatttgagcattttggcgttaagtagaacaaacttccagtttgaagaaaacaaagagagaagttggacaatggccacgataactgtactgcatgtttatagccaccaggactngaaccctcctgatcattcagatgatcggtcaatgttca

SEQ ID NO: 7468 - DNA, 799 bp, Zea mays
tttgtttgtagctttgttattacttgctacattgctagatgtcccacaactatatgagttggagagaatctagaattcgaactcaactgtttagtcaatgctgaatttgcagactagataatacttcaccgatatggaatcttttgtatggtgtatttgttgcttcctttcatcttaatgtttttcatcatggttgttgcatgtatatgcatagaaaaaaatggtgtagataattttgcattgcattttaaggtcatatctttatcttctaagtcatctgcaatgtagtatttggtaacaaaaactttgctatttctttccatacagtattaccactatgcggttctaaaatgttctgtaaatttcttgtgcagaatggatgaagctcggcagccattgtccagaaaagttccaatatcgtcaagccgaataaatccctacaggatgattatcgttatccggttggtggtgttgggtttcttcttccattaccgagtgatgcatccagcgaaagatgcatttgcgttatggctcatatctgtaatctgtgaaatttggtttgccatgtcctggattcttgatcagttcccaaagtggcttccaattgagagagagacttacctggaccgtttgtcgctaaggttagttgcatgttgaatggaataaactgttgccaactatctccattctaaagttccaaatctaagaagttcattgcttgtctgactaggtttgacaaggaaggtcaaccctctcagcttgctccaattgacttctttgtcagtacggttgatcccac

SEQ ID NO: 7469 - DNA, 788 bp, Zea mays
tgcatgcctgcagtctgtgttaatatatctaaccttcggtgtcagaggttcaaggatgcatgaacgttcttattgaagcaaactaatatattcaattattctttggatgtgcataggttgatggaatggggtttgctcccggtggatgtggctagaaaatgttttgagaagaaacaaggtcagaaggttaagtcaccagtcaaagcaattgtggcgaagagaattccttcttctccagccaagacactgccttcatctgcaaagaagttagttatgccttcaaacagtgctggaaagctgaagtctcagaagaaaaggaaggcaagtgatgacacagatgatgacgacgacgacgatgattttgtagcttctaaagcaaagaccaagaggcacaaggcctagttaggtcctagcatctcattatcctagtaatgagacgtgttcttcagacaattttctagctcgggatgaccttgggaggtaatgagatgattgttccttccattggtttgctcatttggggcgcacaactaaattctttgaagtagcgtgttgtgttgtgtcaagatgtaccacttgtcgatggccttttcagatctggaatgaaggtaagttcctgcaaactttcacttgattagcatttgactccagtgaaacatctgattggatgattctatttgcacggggtaacatatttcgccgagctcgacgtaggcgcatccccaagcaaaggtggaaaacagaatttagaataactattaggttgccgtcgacgatatgtaattctt

SEQ ID NO: 7470 - DNA, 727 bp, Zea mays
gctagtaactggagctcatccagaaataaatcaaatgtgtctccattgaatgtggcgttagaaaaggagatgtccaaggaattggaatcaaagaagaagtcaccaagtgtggttgccagattgatgggacttgaagaagatctacctggtcaagagccagcattaccttccactaaaagaaatttgaagaaaagacacctaaatggcaacttggtcaaaacaaacaatctccatcgacatcaagagcagtaccattccagtatgacaacatgcgacaaacacataggacccaaagaaacagttgaatttaaggatgtttatgaagtcagtgaagaaccattgagaacataccattttcaggaccaaacttttcctagggaaatgtcttccaggagcaagagagacataaggatggaaattgttcgtcagaagttcatggaagcaaagcgtcttgctacagatgagaaactcctgcattcaaaggagtttcaagaagctcttgaggttctaagttctaacagagatttgttccttaagtttcttgaggaaccaaactctactttctcaaagcagctagctggacttcacagaagcccatcaccacctcagacaaagcgtattactgtgttgaaaccaactaaatttgttgagagcgattgcagaagggaaatcagaacacacagaataaatgaaggaaatgaacacgtgatgcggaggacacactgga

SEQ ID NO: 7471 - DNA, 876 bp, Zea mays
actcatcaatcagtgcattgtaagcagctgcattcagattaacaccatcttcctgcacaccttgaagaaacctgtccgctacatgcatttgccctccatcacaaaggcctctcacaacaatgctgcagtttaatctagcctacaacaacagttgggagcgaatttggacattggttgtattattagatgcgatgagagccgtaaaagttagtttatgaacttggtcagtagcccctccattgtgaaagcatatttgtgttgaaatgaaacaacaaccaaccaacctttgcaaaatttgaccgacaatcactacattagatacatgtttattgcgtgaaagttgcaacatattggaattacttttaagattatattcatttttgtaataattgacaatgcaccgtaggagaaatctatggtcaaaatatactttggaagactttctcatcctacagtatgacgtaaatttatgggctgagtgagtaacacagattaaaccattattgcatttatcataaaaaaatgctattaagccatcaaatttgtaccaactttgcaaagcagtggtgagaagcaatgatccaacatgcttgttcgagaccctgttgatcacctaaatggcaatctaaaaaattaatggatgtagtattttatctatctatctatttatttattatttattttgtgatgggttgttttgtttgtgagcatgtcctttacttcacttgttatatgtacaggcagagcgtgaaatacagaaggggccgcatgagaaccttcaaggtttcctagatgcagttgatcgcttgagaagtattgagcgtttctttagttcaaatcggagttaccgtagtagcgatggggtgctcaaccaca

SEQ ID NO: 7472 - DNA, 771 bp, Zea mays
cagcttgcatgcctgcaggaggctccggagaaggtgacgtgggtgagggccttctacgacgacttgggcgccttcaccagggaccaggagctgctggtgtcgattccggattcggtggactacgtggaagggttcatggtcctgaacgagcggtccctccacagctcctccatcgccttccccgcgagcgtggacttcagcccggatttcggcaccaggagcagccctaggatctactactgcgtcgagttcgcggtgcaccaccaccacggttaccagaagcagtctcaggcggccgtggaggccatctcgaggcggatgagccacatggcgtcccagctgtacagcgtggaggtgtcctacttggacttcctgaaccgggtcaggatggaggaggtgagcctgcggagcgccgggatgtgggaggaggtgcaccacccgtggctcaacatgttcgtgcccaagcccggggtcgctggcttcagggatctgctcatggacaacgtctcgccggatagcttccagggcctcatcctcatctacccactcctcagagacaagtaagtaccactcttctaataataataataataatgacacaaaagctatgtagtagtacatccatgaagataccgcctactttcggcttttctcaaagcaagcttatctgccttttattaaatccggcctctttcgaccgtcctctcactttattattaactttccaagaaattccaagtttgggcaaagcaagccatttttttttgcatt

SEQ ID NO: 7473 - DNA, 783 bp, Zea mays
agcgtattctgactctctctctcgagagagagacttttggtttagtggtttttcctgaggcaagtcagaggtctctgttgggcctgtagattatatatacactagtccagtgcggtgaacgtggaactttgggtgacgacttcatcttttgttaaagctcaatcagttcagagttgacactgggatgcgatctagcacatacacatatttaaaccccttttgcatccatgtaaacttgtctaaatttattcggagggtatgaacacataacaagacgcttgtaactgaataacttgtgctatcgattacaagtttacgacgttgtttgcacttgttaaaaaaatcttttaagcctagtttggcaacctcattttttttctaggaatttccattttcttaagagtaattagttcaaatttttttttgagaaaattgtgttcctaaactagcccttaggtgaaaaaagaagaaaaacgaagactaattccaaagcagatcagctagctactactatgttttataatttccctgtcgccactctcaaggttgatgctactgactgattgagctcatctacagttttagctgattcatacaatgctgatgatgacgcagatgtgatgctatccgagggaccactagtacaaacacacgatagaacaacccatatttcgcctctatacgacggcgtgggttcccacgagcgccttttgcttgacattaggaaaaaaacaaacccaccatgctatttaagcaaaaggggatctatcatcccctaatggc

SEQ ID NO: 7474 - DNA, 561 bp, Zea mays
agacatatttatttataattcgatttccttgtggttccggtgcaaattacacagatttgttcacagaacagtagggttttcaatgttgggctgcttggagtggagcaaggacccctctgtccattgaccatattggctttgctgtggggtgtgggctctcatctcccatctccttcaccaagcaggccagccggcaacattgttgccgactgccgtcctctgcttccaacaatctccttcagcatcgatccgcccgcccctccctccaccagcagcagcaatccgtttttcaccgtgcctttccactcaccaccagccgccggcccccaggccacaggcccaagccaagccgcgcggcgtcactcccaaaccctagctcgcccgcagtcgccggtgatgtcgtccccttcgtcgtcccctgcgcggaggcgggaggtgggggagggcggctagctccccgtccccgtccccgtgcccgcctccgttgtcggcgactacaaggtcctggcggcggcgcagcacatcgtcaagtcgctcgccacgtccaagaacgccgccgac

SEQ ID NO: 7475 - DNA, 876 bp, Zea mays
agctggcattttagaattatttagtttggtttgggccatttggagcttattgtataatcttttggcttggtaataacggtttgggctgaatagcgtcatctaagttggcccgccagcatttcctgtccaatcaccataactgttattgctgagattaacacaatattctcagtgctggctttagttttttttttaaaaaaaataagcagtctttggcatcttaatttgtgtacattgctttaggtgattcttttaaaagagagctttagttgtttttttaatattgttttctgctttaggtggttcctaaccctgagatttatgtgacctttcaggtttggttctttctttgcttcctggttccttggcaccttcttgatggtatctgtaattccccctatactccccggtccaagaaacttggaagtgagcaccgcgtgtgttacttatgtgctccttttcatatcgtcgaccttcttgaagtaagagatctttgtgtttccatgttagcgcaaagtcttgcaggagttataaacatggtatcatgcttcaaatagcttgtacaatccatcggctttttctttgcttgtttcacgtttatggagttggaaatgctagttccttagtgagttgatagtagttttcaggttgcaatgtgagatgtagaacgttttttttttgctttggcccgtgatatcttgagcagggtctaacacctcaagtaggtattttcggttgatgtattaaatacagttgtgttcgaatagatcatatgagataatatctcatcagtcttattttggatggacatcacgtcaccttggaacattacagtccgttctccctgaatgctgactgttctgatcgcgtttgcaa

SEQ ID NO: 7476 - DNA, 759 bp, Zea mays
tgctcgacgtcagcgccaacctgctgaacggcaccctgccgtcggacttcggcggcgccgcgcttcggtacgtcaacctgtcctccaacggcatcgccggcgccataccgtcggagatggcctcgcgtctgccggccaatgtcaccatcgacctgtcctacaacaacctcaccggcgccatcccgtcggtgccgccgttctcggcgcagaagcccacggcgttcgagggcaacgccgagctctgtggaaggcccctcgacagcctctgcggcttcacgtcctcctcctctgctgccgcggagccccagcccccgaacgctaccgcaaagtcgccgccggccatcgcggcgatacccagggacccgacggaggcgctccctggcgatgataccggcagtgccactggagcgtcggcatccggggagcagcgcggcaggatgcggcttgctaccatcgtcgccatcgtcgccggcgatgtggctggcatcgccatcctattcgtggtggtcctgtacgtgtaccaggtgaggaggaggaggcagcgtcaggaggtggcgaagcagaggatgggcgtcgtgttcaagaagcccgagccggacgagtctccggacgcagtcggccggagcctttcctgctgcctgcgcaagaaggccagcgacgacgcggaggaagtcacagacacgtcggcctccttcgccgcccaggagggcaacacagacaggaacagcaaggcggggagttgaccgccgcagcgtgcaa

SEQ ID NO: 7477 - DNA, 792 bp, Zea mays
ttcttatccggatctcgaagtggcaataccttcaaatttccagcaaaacactggtgtgaaggcaatcaatcagaatccggaagaatcttcaggggtaagaaaccacaattgcgatatgacaatgatttatgtatgatgtgtgctttagcttctcatcactgttccaatgtttttcaactggtatttccctagttttatgcttccttttgattagcttcctgtggataattggttcatctccttgaattggttttagttggtgctcattccgttgaattgtattaagtagtaagtacaactccatttatctttctgaggaaacattcttactgctattcatagttagtatcattagtccttccattgtgaaccttttatgtgtgcacatgcatgtgttgtcatttatatagtttcgtatttgcacatgtctgacattgcagtgaaatagcacgaatgcattagttaatttgtttttttggactcttaagtattttggcagtatcattaattactaaagtaagaaaatactcgcacattctttttcttactggtgtaatgttttctggaaatactttttaattatcattctcacactgttagttttaattttgaatgcgtttttttttatgtgtgcttctcttctacccaaggtgatgtttatccagtggaatcttatgaaagcttctcatcaacaagtcaaattctggatgctcattggggtgttatgactgatggcgatgtaccggcttgtgttctaatgactttgaactggtttgtgctagctagagatga

SEQ ID NO: 7478 - DNA, 796 bp, Zea mays
aagaattattgcaatataactctagcaactgatccactcctccagacataaataatttgggcaaatttgctcatggatcatgcatgtaatgggctaaatcgacataaatgtgaattggaagctcaatagtcaatacaaacctcacagatgccatactgctctagcatcttttgcaatctaaccattctgtcaatgtctccggtgagctgcatatgccaacaaggttattgctcactaagcatggcaccaaggaaacattattgattctaaagaaattggtacaagtatgaatgcatattaatccaaaacaaactggaaaaccattggtcgagccaaatgttatatatatatataaattttcaatcagtcttctacaactacaatggacagttgctaaaaaaaattcagtagctgaccttatttaccttttaacattaatatactatgtcagttaatggtaggatcataacttaactaaatgatggagtcaaagataaaccatatggtgttctactgtcccaaggatcttatacaagtagattaaattatcataattttcgaaggacattagagtgctacatgaggtatgtgcaagtaaacattctttcaattataactaccagtagtgtaattgtgtggtctgatatgtcaactttctgtgcctcaaaaatctgagcaatatctaagacatcccttcgagctgtagcatttgccgcgacctttatgatcattaactctctagcagcaaatggtaagtgggtaaaattcctggaccctggagaaacccaaaaaaaaa

SEQ ID NO: 7479 - DNA, 861 bp, Zea mays
tgcagccgcactcgatcgtcagtacgtgtgctttgatgcccttgtacgtccagttgatcgtcagttgtgtttttacgacttcttttgcaaatcaaattctccaataataattagttaatcaatgatgtaacgactgtgtgtgtgttcctttgcatatatggatatggatatggatatacgcatgcggcagcccatgtttacgggggaggcagcagcatgcgggcaacaatgaagtcctttcagacagctggtggtggtgccagcctgatgagcttcgtgccggcggccgatcatggcatccagcaagggatccctacgtacgacagtgtctatgccgcagccgggtgagtcgtactacttgtattgtatcatctagctagccatgcacactgcatgcattggccaccggccggccatcacagtcgctagcttctgatgcatgcatgatgccggccggtcggccggccagtcgagatcgatcgatccatgcatctctttgtctccctctccccgtccccgatctgcactgctgcgctctagctgtaaagacatgggtttcggttaaaggcagcgccggccggcctctctgctgctggcatgcatgccggccagcctctctgctcggtcgttaattgtaggaaggggccagccactgcaccgtccatcacccacgcatgtgcctctcgtcttcatgcatgtgtcccatgggccacacagctatagctagctcctgcatgcgtgcagcgctcgctactacagcgagagcgaggtcgtttgtcgggcacactctttacagactacaataatggattttctacgtacagcggggtatatatatagatatatctacatataatccat

SEQ ID NO: 7480 - DNA, 797 bp, Zea mays
agccagagagctgacatgtgacagtggcgccggctggcccatcttgtggtccggcccttggtcgcatcagcagggagtagcagtgtcttgcgtgcctctcttgcattgcatgagctcaccccacgaccttgacaggcataaatataatcgcgcagcaacaacagatgaacaatgttcaaagcgtgggtccgccgttcaagcaggaaaaatgagcactactatgtacatgtactagtacatgtgtatgtgtatatatggaccttttgctctggtcgtctctcttgtctcgactgagtttacgtatgcaggtaaccccttccccagctcgccctaaagagtgcgagtgagtgagtgaggcttgattagtactactactactagtttaacctcagtgcggctaactatctagtctagtatagagccgcatgatttgactaatcaccattcgtttggtgcctagcgacgcggccaaggaagaagctgtccgttggtttccacaccgggaatcattcctaaagctctctctctctctgtgatcatgcttcaacgtacgtactaattataaacagatatgccggacacacgacgcgaccaaaatggagctgatttctgtgcctgggatcattttttttggtagtactactgtctactcttgattgattcgtatcatcaggatcgagggggtgtggaacagatcgcagccactgctctctctatttttttttctagcgcctgctgggtgcttgggccaatgcaacgcgccaacgcccccatgttctccttggggatttcgatcg

SEQ ID NO: 7481 - DNA, 803 bp, Zea mays
agagattatattagcttgccacaacaaaaatgcctagaagcatgattgaagaaaaacggactctcagagccattacctgatgctgagcaaggaactgctcagctgggataagagaaccatcgtctgttctctgcctcttaggttcgggttcatcgggtggaggcggttgctcttcagcaggaggttgcggaggcagtgggggtgctggaggctgagggattccaatgggattgatcatgtgtggcatgtgcgatgatgggggcatagcaaatgtgtgtggtggtggaccaggcataaactgagtttggccaggaggcggaggaatgctggttggcatatgaaccatttgacctggcatcctaaccatcggcggttgcccaggtatctgctgtgggtgcagatgcatgtgaggcatcatctgtggaactccaggcatatgagaacctgggggtggaacagagtatggtgctggtggagcaataaaacgaggaacattaacaagaggaagtggctgaggaggtcggggcagcggcatgccaggtcggacaagtggagctggaccaggaacaggtctcccatcaacattggaagcatcaaactgttcctcaccaccctgaatctgagataatgcatgagtagcagtgcgaccaatgctacccagaatgaccatcccaaataacctgctttggctgctcatcttttttcttctcaatttctgccttgaccgcgttagacacctcctcctcaatagtcccaaaaatatcaaggcgagtgcgaaccagaccaacaatggtccgtgaaat

SEQ ID NO: 7482 - DNA, 825 bp, Zea mays
agtacctaaggtgacaggctgctactctagattcttcatgccttttgtttaagctcccttgtgcctcacaagtggacacgaaggcaacgcaactgtgacatgcatgttagtattacaggcagctagctacagtctttttcccttagtatataattaattaaactatgcagattgcgccgcgtcagcttggttaggtcaggtttcgccaggcctctctacccataccgctgctctgaattatttgaccgacggccggccggccggctggtcctgggcccaaagaccagcttgtttgcctcgtactacaaagcctttccgacgtcaggactcaggaggactcaggaagagaagggcaggcagacagatctaatctaagcgtccatctttcgttcgatacgtacgtgctggtgctgctgcggggaatctcgcccctgccctgtctgcaacctgcctgtaaccacgaccgtcagcttggccagccacagccagtatccttatttactatagattagggcaaaactgagcccacttggacactgaaacttttgcccagccttttccttcccgagggaacaaaaaggtggagaaccgcccactgccactcatgatggatggtagccagaccagaccagggatcgggacatggaaatccccagatgtcggcatcggcatcggcatcgcgcccggttcttttatttgttgcttggtggtttttaccctggtgttttggttcgcttgtttggacaaggctggcaatgccactcactgcacatccaccgtcgtgatcagaggtgaaagggatttttggttgtaccagaggaagag

SEQ ID NO: 7483 - DNA, 765 bp, Zea mays
gctcgacgacggggagaatagcgtggcgtgggcggcgccatgaagtacagcaaggaagataagcccgagagggcgggcggcgccggcgcagggtccagggcggtgccggtggcgctcgtcgtcgtcgtgctctgcgccttctccttctacctgggcggcatctacagcacgggacggagcctgctggactccatccagccggcgccgacggctctcctcgccctcggcgccgccacgacgacccgccgtccctccgacgacggccaggctcggccggcactggcgtccacggccgccgtggcgttccccgagtgccccgccgattaccaggactacaccccctgcaccgaccccaagcgctggcggaggtacggcaactaccgcctgagcttcatggagcggcactgcccgccgccgcccgaccggcagcagtgcctggtgccgccgcccaaggggtacaagccgcccatccggtggcccaagagcaaggaccagtgctggtaccggaacgtcccctacgactggatcaacagccagaagtccaaccagcactggctcgtcaaggagggcgaccgcttccggttccccggcggcggcaccatgttccccaacggcgtgggcgcgtacgtggacctgatgcagggcctggtcccgggcatgcgcgacggcaccgggccgcaccgggctcgacaccggctgcggcgtcgccagctggggcggcgacctgctggggcggggcatcctcaccgtgtcgctggcgcccca

SEQ ID NO: 7484 - DNA, 817 bp, Zea mays
gcaattgcaattggttggtgatgatatttatttattttggattattgaatttgcagagctgagaaactgagatccattcgttgctgctgcttcttcttcttcttctcttacctgtgagactctgctgtgaacaggccatcaagatgcaacaggtcataggtgcgtggatatgtcgagaacgcctcacacctgtaaataaacattattattagtataccatccgtggatgaggcaattagctactgaacttgattggaaccaatcgaagatataattaagttaccaaccagtcgtggttgacgccgatgagccctctgtcgtagacgacgccgagggagtttgggccgtaggaggagacgacgttcatgacccagacggggtccttgatgaggctgcctgcgaatcctccgtacacggtgttcatgtccatgacgttcctgatcttgtcgctccccagcgccggcagcagcgtcttgtagtgcttgaccctgagcttccaccgggcgtcgtcctgcttgaaggcggcggcgctgctgcccgggacgacgctgatgcgctccggcgcgacgctgagcctctggggccacttgggcgtggcgttgagccccagcttcctgtacttggggctgggagccgtgacgcaggagcgcatgggcacgtaccaggcggcgtcggggtcgacgctgtcgtcgcacttggcgggcgtggtgaccggggtgagcttgtcgtagcaggcgtcggcggacttctgccacacggcgatgtcccccttcatgctgtagagcttgaagcacatgctggccagcattttcttgag

SEQ ID NO: 7485 - DNA, 835 bp, Zea mays
atgccagcgacggccaagtactatattgttagaatttcaccagtcaaacgccatctgtctctgcgctccatgcctgcatcagcatctaacctttgcttttggattattatatacttaactgaggacagtgaacaatagttaattaacccaaccagtttcttttgtcatgtacattcctccacaaagaatgtttgtttcaacttatatttcttcataaaaaatgttttctcagctagaggctagagccagcaaccagacagggattctgaagctccccacccccactacgaaatgttgaagacgcatgtgcgtgcaaacaaacaaaatcctgccaattatttgtcggccgtcctagcacgagtacatacatgcatggtctcatcgtgacatcggcgtgagacttttcagacctccttttcagctttcttccccgggggccatgattggtggtaaccagggaacaaatacgatatagactgctctgcgcatcttgatgaggaggatgcatatgcttatcagctgcacttttgattctagtcttctagaccaagaagtgtgcacgttacattcgcgtgccaaagacgtgaatatgaaatgacgacacatatagattagagacgggtcaattctaagtgctagtgcctggtaacaggttaacagcatttagttcatcattgagactgctcaggctttaaaaaaaattgggttgaatttatagagcaggttattaagcgctctaaaagatcatgaagataaagttataaacttttagaaggcatttagatacgtcattttatttattatttagattaaaaatattttttaaaccatttga

SEQ ID NO: 7486 - DNA, 817 bp, Zea mays
aatccgctggaacctgaaggaccctgagtatcaaatcataaagaattgcaagacaataatagagtcaaacaggactataagtctataacatagcacacccatcaattgtttagctaattatctatataagcatatgcagaagggcagaccgggtgccatggtgagagctgagctgtctcactaagtcaccaggtcgtgaattcgaagcagcatctccacatttgcggaggaaggcttgcttcggtttatcccttccccatactcatgtgggagcctccggcactatgtctgcccttttatctatataagcatatgcattatcaatggcatgcaagcaactaagtgactaaccttacaagttacaacaaagcagaaaaatctaatatgctaaactccaaccaacaaatatagaagaatcatactaaaatggagttgtgtcatctgatattcctgaagtccacatgtaacgaagattacacatgtgtttcttaagttcgagtcaagagctattgcgtaaatctgaagaatttatagattattttggtaatctgtcacttagaagcttcacatttaatgcattgttgtaaaccttgagaggccaatttgtttgcttgttgaccttcaatcgaaagttttcaaatatataagtttactgaaatgcccaccctggcaaactcctaaaagatgaattccaacatagctccaacttggccatgttcacgacaagagttacattccgatttcttcaaacaatgcacaaagccacaatgtttatttgaatgttcaagaatgcggagcgcatttatcatgaacttca

SEQ ID NO: 7487 - DNA, 805 bp, Zea mays
tggcatatcgtcggtcgacagcatttccagctcgctcagtgggataagctaccaagacgttagctctgcctgtgcctacggagcatcctctcatcatcaccatcagaggaggaggacatccgaagaaaagggtgcccagcaactgcgtccttccaaacccggtccaaaggcggagaaggtcggtctcagacatgaggcggtggacggtcggagggccgctgaggagtggatggtcgactacgctctccggaaggaagtcaagaggctggctcgtgctcagaagaggaaagttgagatgcttgtccaggccttcgaatctgttctgcccacggtagcaatagcaagcgagaagaagcccgggcaacacgatggccttcgaaagcatgcatgtagctgacagatagatagatagaatcatagatagccgacactcatcttgagtcaggtagtagtaggacgtgacaatttgagtcaggtagatgaaacgtttcaattcagtcaaacactagtcacaacggatacaaggtttgatgctccaccaaccactgatccgttgtgaacttgtagtagaagcaggccaccgctggcaatgtggcatgccatgccatcaacctaacatggaccattctgaatgtcagctcaaaacgtggcaaaatactatacttccacatgaagaccattgttcaggaagatgacagaattcagggagagagagagaaaaaaaaacattacaattgtttaagaactgcaaatttatagttacaattctagttacaggttgcagccaaaaaaaggaaatatggaa

SEQ ID NO: 7488 - DNA, 831 bp, Zea mays
gtgtttacctctacttccgaggaagtgggaaggaagcggagatgaggcgggaagcagcacgcagtgctgcgagggcagcattttgacgaaccgtgtatatattatatagcacggcgtgcgttttgttcatagtttgaagtgtttgtagatcaacatacatatgtagagtagtgttgccgtgttggtgtactgtaaatcttcagaatttttcttaccagtatttgtagccctaatacaaataataaaattgtaatgatgatctcactcaagcttttaggaagaaaaatatatacttacattgtcaagggttgtactcatacccactcgcaaagagttttttttcccctaataccagcaaataataagttcttcaaaatttgggaaaagaggtttcttagcctgtgttcagagttcttcaacatttgggaaaagaggaagtcgttgcggcatggatctcatctcttcatccatctggaggaaaacggtaacattcttcagaataaaactgatgatgcatttgttttcttctctgaaaagagctcagatccaaactcaagttttcagatgcaaatttgaatttacacgggcaaaaaaaataatgctccagcagcagcatcagtgctacaaacatgagtttacatttaccccatgtatttatttctacaagctcatcagtcgtcagcgcaagcaatcttgagatacttatcgagcgcttcgtccttggttatgtcagtgtagtatccctgctcaacctcaagttcctggtcttctgcaatctgttccacgacggtctgaacttgataggcgctggcatgatctgaatccagcaag

SEQ ID NO: 7489 - DNA, 738 bp, Zea mays
gggataagaacctgtgagcgagtgaaaacgaacatttttgctgggattcggcccgccgatagtggatgcggagaatgggaggaagaggaaccaaacattcaagtcaaaggaggctggctaataaaagccgggttcttcgctggcgaggatagatttgtcaccccccggtaaagtaaaacaaacaaaacatgtagaatccggccggacctggggaagttggtgttgttgatctttttctcgccgtacttcctccattggtggccatcgttgtgcggcgcgaaggtgtccaccttcctcatccgcttctccttcctgccaagattccccgcaagaaagaaaaaaaaaaagaagacgaaatcaggcgccgccttccaaaccgaaccgcgcaggtgcagagatcacaggcgaacccggccgcagctagttacctcgaattgatctgcgagtgatgcgaactcggcgccggagacattgtttggctgcggtggaggaaggggtcaagaaatgcaggtgcgggaccggagaagaggggtggcgaagaagacgcgggcaggcggccggccgtgggaggacggagcatacagcatgttgcaggcccagagcgctttttaatttcggaagcgtacttgacttgaccccaccacaccagggccaggccagcagaggagcatcaccaaaaaaaaaagggccggaaaaaaaaatccctttattattgaacctgcgggcattataaactct

SEQ ID NO: 7490 - DNA, 781 bp, Zea mays
tgcgggtctttttaaaaaaagagagaattttttttatatatgacgttcaaatcttcactcatttcttatatggcattcgaaatcatgagttttcttcgttgccatcggtttaagtgtggcactgccgaggtcaatagttgtacagttctagaatggcgtccgtattcatttaaaataccgatttttgcactctgcttggtagtcccccataatggcgaggcctgagaagcctacagggccacaacggcgcgggataggagcattcggcgttactttgtttttttttcttgcagcgatatgcgcacgcaagtaaacggatattttgacgggatctaacggcaatgacagctaaaggaaccgaaaatataaaaccagtgggcagtggcattgagatgagctcatatttttaaatggtacataaggaaaaaataataagttttggtggtatataagaatttttctcttaaaaaaaccaggcatgcgattgggattcctccatcggaacacggtagaattctctcgtttcgggtgaccattgggaagcgcgccgcgcgcgcgagcagctcccagttgccctccttccaagcaacggagacgattccactggcctcgccagggaaacgcatcaatcaggtcaagcccagctggtagggcaaggataacctctcccttaaaataattagtaccactataatgttcgtatcactcaaagaattttaaatttaactaaatctatataaattattagtattacttggttttaaataaatttgttgtaaaa

SEQ ID NO: 7491 - DNA, 713 bp, Zea mays
ttgaacattctcttgcagcaacagccatctcacgagcactaacatccttggatggctcccacagacttgcatccttatggaagagagtaccaatcttctctccttggagaactctaacaatgctctgagatgcaaatccacttcaagaataaaaaggaagttaaaccaattcgctatccatcatacagagacaaacatagattacagcatatgaagtttacttggttctctcaaggtgacaactgatgaaatgaacactgttagacaagcattactccatccattttgcaatgtttgtccatagcataccaagcgcagagactactgaagtattgttccaagaaaaattcaaattaacatgatacaactactcttctttcaacacatctaattaggggagagtggaaacatagcaataactacactcctgatatcctcaatagacaaacaatgtgcaacacattttcctaaggccatgaacaaacattgaaaacagatggcgtatttggatttgaacagcagaccttattatatgtaaataaaatccaacatagaaaaataagtgaacatcacaagcgaggattcagcataacagtctaaggaaatataatgatgtgcagctcttctgcgcgttcgagagagaaaaaagtctaaggaaatatttcacttttgaaaaccaattctttacatcatttaagatgtaagaaacactc

SEQ ID NO: 7492 - DNA, 912 bp, Zea mays
tgctcggtcctggggggcctcacgagtcgacctgcaggaaagtgagaaatagactctattccttgtgctattggacggatggcattcctatccctatactgaactttattttaatgccagtctaagtaactcgtgaagcagcatgagcatgtccacgaattagacttacatgttccgtggaatcatgatgaggatgattctttctaatattatcctaccaaaggtcaatttaaaagatagacaagctttgcttaagtttgataattagtggagctgtgtaacatactgatccccagcccccaccatccctgtaatttctgctccccatcttacgctaagatcagtgatgagaatttttgggggaaagggtgtgaaaatcaggaacaaggttgatcatgtttgttactccattccaaattataaaacattttggtatttgtaaatactttgtatctagagtctagacacagacatagcttatatcttggtgcgtggcaaaagctataaactagaaaatccaaaacataatataatttggaaagggtgctaatttactatgctcgacttataatgttgacagcttggatcaggtatccaagctctcttaaaataacactatagtcactaccagcccttacatactatacttaaaataacactgtagtcactaccagcccttacatactatacaaaacttggtgtccttgctatctgttgtgaattgtgacaaccaaggggcgaacttccaacttcttcattcttgttctagctatgtagtgagaaaaatgatctttctaatagactggtgttttcaagtcggacgacttgctggtcgttctggctgaccaactaggtcgattaatcgtgataaagtcggacgacttgggcgattaatcctaattggcccaacca

SEQ ID NO: 7493 - DNA, 764 bp, Zea mays
aaaggtaatgtccatatgaaataactagttctgtgaactatttgcaacaacagaaaaaagtttaaaaaaaaggaacacgggacggaatgacaatcacaatgtaacggaaatcatcaattatttcaatcaagaaaatgaaaagatgccagatcagatatgcagcatagaagatctagtgtttataatgtggcagcagcttgacatggtatattacagtgaaacatttaaacatataccttttacttcacaaaccaattccatatggtggttagctacattcattagctgctgataaccaggatatccctcaacatacaatatttcatccaattgtctgaattttcctggatccttatcgttctgcaagaatggatgatagagtaataaggtttaggttaaacacaaaccatgtaactttaaaagaaaaaaaaacatcaattggcataccgacatacgtgcagcttcaaaagttggtaggaaaatgaagatgggatcaacaggggtgcaataataaaggccaccatctataagggagagcattgaatgctaaaatgaggcactgaagcagaatgcagtctgatatctgctcagaaatgttttatttcaagcattatactactcggcactcggaatgtaaatgtgccatatatggtataaaaaaactcatctcattatcttataatattcctttttagatagatttaacaagatggtttgaagtggtagggaagaaaaccgtgtgtgtgtcatgaaaatgtctattc

SEQ ID NO: 7494 - DNA, 795 bp, Zea mays
aagtgactcggctagggttacctttgtggtggtggtggtgctccagtgcactgccatgccactgctactggcctgctgctcttgtccgaacattccaacgacggtcgtaccgtacagatttttgggtgttcttttttgttcgattcagaaggggaacccagttcaaccagccacatgcctaccggctgccgtaccatgctcggcaagacgctgcacgtgatggaaccactaatcaatctccccatggaccaccgctgccaggcgtctttcagaaaccaaacgcaacgaacaggcaggcgcacggggattgcagagaaaaatcagggttcagctccacagagcgtgtgcagtgcagaccgcagccacgcttctgcgatctgagcctcaggagattgcttgcattgcagctctcacgcgacgcaaccatctcttactctgataggaaagtagagtgcgtgtgttgcagcagtagcacacaagcaggccgaagagagatagtactagcaagaaacagaggagattgaaagtcggagacatagaaacagagatcagtcattacaactcgtcgagacgctttcagctactactaatcacggctattaggcccggttttgtcgggcgtttttattgctcatggtataattttcccctgtattaaaatatagggaatcgttggttatattatactccctatatacgtaagaccgtaattttgaaaggaacagcgctagatgcgaggtctacgaacgaacgagctttttggggggcattcatgttgaaacaatggttcctttt

SEQ ID NO: 7495 - DNA, 761 bp, Zea mays
agctagctgaggagaagctagctagctagctagctgctatggtagccactgcttttgggccgcgcgcgagggtcaaaagcgcgcgcgcgatgcggatgccccggccccgcgcgcatccagcatactagttctgcatataccgagtgtgcatagctagtgtcatcaggtccacacaagaagaattggagatagagaaaatgactggagattctatgggggacatgtgcagatgtgctactagcagactcagacagcagcagcagcagcaacaaaaactattaggaacagcacaacgacatagccagcagctagccacacacagtagtaaaccttaactcatatcagccaatagcatgcagaagcagcaagttggtgacggtaccatgcatcatatatactcctgatgagcttgacgtaccggccaccggccactatataaactggccatcgatcatcagctagctagccagcagcaggtagtaccttggccaaacgacttagctatcaagctcgaccgacgaccgaagctaagctaccaagctactagtagtcttcttggtcacgtaccggccgttgttgattgcagcggtcgagcacacacaagctaggcagctagctagctagagctagggtcgtcggatagatcgacatggccggcagggacagggagccgctggtggttggtaaggtggtcggcgacgtgctggaccccttcgtccggaccaccaaccttaaggtcaggtacggggccaggaccgtgt

SEQ ID NO: 7496 - DNA, 778 bp, Zea mays
aagcgcccgactgagggaggagagtagcgctacagcggggccgccacgccgagagccggggaagcaacttcgggcttgggtggggttggaagagcactgcacaccaggggtgggaggaggagcggcgctggccgcctggccgagccgccgggaaagttagacagctagtggaagcagcggcgatgcctgtggtttgtgggagactgtgggccttatgtacctagagatgcagccacacgttattgggcttgagccagatatgtatgtttttcaggcctgtggggaacccgcgggcgagatttattacccgctccgaacccacagttgtacgggtcctccaacctgtcgatgtcacaacggaatgacactagtcttgaccgttctctcacccctgcacaagcatatttatggtttatttggttgaaatgtggctataaaaaaattgttgtgggctatgagctatggaaaaaactgctgtgggctgtgaattgttaaaaaactaaaaaccgtttgatggaaaccactaaaagtcgttaaaagtttttcgatatatgttttcacagttccatcggaaagccattaaaagtaggtctagtggtgatttcaattttacacgcgagaaagtcggattatagaaaaaaaaaattgattcctaaatctaaacatttggtttggctttttagagggaaaaaaaaatcaaaactaaaagccaaactaaacacaccccttagcccatcacagcccaccacactaaagcaaacttgtcttcgaggacttt

SEQ ID NO: 7497 - DNA, 729 bp, Zea mays
tcaaggagacccacgtaagatcaaagattctgttgttgcaattaataaatattttagacatctccctgaagggagcttggcaaacaagtctgcatcagacattgagaatggcatcaaaccttttatcagcagtaagcaaaagaatcaaaatgggagcataactgaaatcagtggccatatagtagcaccaaaaggtgcatctgtattttatgaagaggccaggaggcatttatcagagatgctaaaaggtaatgactgttccataaactatccagaagttcaaatatcaaaatccttggaaggcatactttctcttcctcatggcaatgtgtcaaccactgggagtagcctgaggggaaaggattaccttgacccctcacctggagaaacagatgtttacgatgcatgtgaggttgagagagaagaatgcacacaagagagaagccaatcacaagaggattttggaagcattgctcactgtacttgcacaacagttgatgatcaggtgacagttcgagaaggatattacacgaatgaagcacaagaaggtaattcacttgatgctatgaatgatggatgcttattttttgaatacaaataaacacaagaattttggacaggaccaagacatgctcatgatgagccagacactctgtatattgaaggacttgataaattcatttgccgcgaaaacattcgcaacgaagagtccagtccagcagaacaaag

SEQ ID NO: 7498 - DNA, 749 bp, Zea mays
tctcatcgttagtttgctgaggaataaggataacaaaagcagagaacaaaaacgaaacgtatcgaggaaaatatagttaagaggccctaaactggttgtcacagaaaattatagcagaaatgatcaaagcaacaacaagaaaaaaaaagaacaacaagggcatatgaaaataatttgagttaagtgcctacttttgaagaacatattgtttgagtagcagaactatcatctgtgtcctcacaaaatggcaaagaaccaatattatgaccaccctgtggtttcatgctgccaaaacaagtgacttcgactttcccatcaaagctagcagatgggatgattttctcttttgactgccttttatttttagggaagaaaaaactcgaaactctccctttgaatgatgactttgctttatcagatcttgtggccgagtttggtgttttacagccttcacaattggatgacggggcatttggtgctatgtcatcaaacatggacgatgacactgggacagattttgatcttgctaaagtcgttggagacctctgcccatctccttcgttctctctaagaacagttatacacgtagctcgcagggtcatctctttctcggcatcacatggcctactacttgaaacagaacccataccaccagcttcttttttgactccccgaagggaaagcatttctcccaaagtgcttgaacttcttggcagttgcagcttttcttggttggtctcattatatgc

SEQ ID NO: 7499 - DNA, 784 bp, Zea mays
cttgcatgcctgcagccgaacacagatagacgacggcctgttctgttccggtagggaattcaccttaggcgagaacgcggccggctgcaaagcttggcgagtatggagtaaaacttattttttgagggctgccgcctttggacaaatccagtaaactcaccgagtttcggaaatgtgggactgagaagggacggcgatcccagatcacacagaggacaggggaaaacgaagccaccgagcccccacacgtcgccatccatcgccgtaatcgatcaccgccgtctcctcccccacacacccaccggaaccgtcgtcctgacctctcgccagcgataagcaaatctcctccccactttatcgtccacaaagccttcttcccgccctcccgaatcgctccctctctgtccctgcgctccagccgccgccgtcgcctccgccccccgaatcccaatggcgtccgcggccgcccctccaacctccctctccctcgcggcccgcgcggccaccagggcagccgccgccgccgccgccccgctgcgcaggggaggcctcgccacggcgtgccagccggcatggtctctggctttcgcggcgggcgacgcgcggctcgcggtccacgttgcgtcgcgatgccggcaggcgttctccgggcgtggcacgcgggccatggccaccatggcgaagaagagcgtaggggaactcacggaggccgacctcgaggggaagcgcgtcttcgtgcgcgccgacctcaacgtgccgctcgacgagaaccagaacatcaccg

SEQ ID NO: 7500 - DNA, 849 bp, Zea mays
aggatcaaccggagaagggtgaacaaaaagatccgtttgctcgcgttgcggcgccggctgatctaaaggctcctagaacacctgtcgctttacttgcagccacatcagagacgcaccgtatcatcagggttctaagatcatcgagacaagacatgcacaatcattgggcatgcagcgcgacgataaaaaaaaatgatgctaatcgatctctgcgtttggtttcagtctcattccctgagccgaacctgcgagtggacggacagtggtatagctagctagaataatagcgtgagcatctggaaaaggtagacgtaatcccatttcccccgacaggattaagctcccgcgcgcatggcagatgagtgccgccgccgtcccttttttccttctcttcttcttctttttttctttggtgaaagagatgagtgagtgccatctgaatgacccgacagaaggaatcgatcaggtagtagttagtatgtatatatcggttagaaagataatataaatcacaagtatagacaaaactatcggtccggtagatcgacgggggcgcgcgcatcagtgaagtgatgctcctctcttttctttttctttttttctcgatgaagaagaacaatctgctacaatgcgacggcgcggacacgcttcaaaatttgcgtttcagtaatccagtggtcgttgtagaaagaacaatacaggtagatgcgtcggacagacgtgggtgtcctatcgacgagtgaactgttcccagggcacgcgcagctcggcggtgctctgctcgtagggcagaaaaagaaacgctggtacttgtccatcaagggaccaggacagacaggacacccaggc

SEQ ID NO: 7501 - DNA, 871 bp, Zea mays
cttgcatgcctgcaggaactcatcagctggatctatctacctatcgatccaagtacacaaaacagtttggttggccatgttctgtgaaattttttaaaattactacaagatcaggtcagatcagatcttggcagcaagcagggctggaaaatgctctggtgtcagggaactaacggaagaatgagatgtaaaagaacatgcatcacagctagagcaaggtacaagtttcaacttatttaaactagcgataagtcctcccttacaacttaaccatgtgtacccccatgttgtgatcacaacacatcaccactactccactaggccacagcaccttgatgggatctaaatccaaagccctctctgcattcccatgatgcttccatctctattacttaaaccttgtgagtgacacctaacatgtcccctaaactgtttgccgtcgctcacgcggtctcattttttttttcgtgcacttgtggtctgtctgttggatgacattgacttggtacatactactactactaacacaaagctaacttgagaaaacttcatcaaactgatgtttaaaagtttcaagtttgggtgaatcttgaacaagatgctagttagcttaaaaaaatttcaaccagaacatatagcaaaacgtcatcttattaacacagtagttctaagttctcttggactctttctactcataggttataggtatgtacatgtttcttgataaaagtttcagatttttcaatagcacctactttttttgttactttccagcaggggttgccacccttttgcacggttaattaaagttgggagggattttttttaatcttttggagaggtgattatacttaacctacacttcctgact

SEQ ID NO: 7502 - DNA, 1074 bp, Zea mays
atcttgcatgcctgcagtgacctttagtcgtatagatcctggagggaaacttgttatgggctttcggaaggccacaaatactgtcagtctgccagtaagttagattttccataagataatctattgctgatgcaagtgcttgtttttcatctcctttctcatgtttttgcttcgatgtttgtttattacttttacgcaggactcacagatttcagctattgcaaatggttcccttctcagtgagacactcttttctactgcaaatgagaacataggtgtcgtaagtggttatcctggatttcttcactcaataaagggagccgcagatctccatccaaactctctatatgatcatcatatgaacttagttgatggggatgtcagttggaataaggcagataaatttggcagcaggccagatgaggggtctttgcaatttctacaaaaacgaagtcgcaatattggttccaaaagcaggaggttcttaatcgacgctgaagatgccatggaactaaagcttacctgggaagaagctcaagagttgttgcgccctgctcccactgcaaaaccaactgttgtgatgattgaggactatgaatttgaagaatatgatgtaagtttgctattcatttcattgttattgttctaaatcatggatcatcctctctgtcaggcacaaaaaactgatctttgttcatcgcagaagtacaagtacttgaatgatcttcaacctgatctaaccatactacatacatgcaggaaccccctgtctttgcaaagagatcaatttttaccatccgtgcaacagggtaagtcagaaaaagatacagtatcgttattttttatttacttttgagtgattatgaatagtatccataatgacttgtacttcttcataacacattttaaatacctttcccaaacataaaaaaactgaaattacttatgtcttaagatcttccaattctaggacaatctaagtgagacacatctaattctaggaaatacctgagattgaattttatatactttccatgaaaaagacataccatagtgctctaagaggtggaaatg

SEQ ID NO: 7503 - DNA, 704 bp, Zea mays
atcttgcatgcctgcagagtttctatcagtgcgataatcgaacagactttttagtttcagaaattatgttgagagtgcatgggtttgaggataccttcaacttattacttgcaagttatttttactattacgctgggtggccaacacttacaccggtttacttctcatctattcatttcgattatcaacatgtgtcatgttataatgcggtgctgcttgtctgcaaactgacgtcctaggctttcaattccagcatatatatctgcgtgtatttgatagctgatgcaaagctttcagtttgttttaatgtgattctgtgtctgagtgaatgacagaatgggatccatgggggtgttcccgatgactacgaatgtgaggtgattgaagacgacaccccaattcctaagcatgttcctcagcaccggcctgttgctcttcctgaggagttcttcaaggcactagatgctgtcaaatctgatcctgctcttcaaggcgatgctcctcctcaagtgaaggcgtaaggatggctgttcctggctaacgtcatttcacattttgccgcggtgggtagggactggtttcttgtgtcatttgccagcaatgcgcttgttctgagcagaataaatttctggtgagtaccatcaaagtgtgaatttgaacttagtgattcggcacagtaacttgtgcccagaaactcgtgcctg

SEQ ID NO: 7504 - DNA, 812 bp, Zea mays
atacccaatttctttcttcgccagttttttccttgcgatgtacttactgtttcatgccacacttgctgctatcttcagtaccctatcatttctctgctacttgttttgtttgatcgctcgtcttggttgggtcctatccatttgtacaattacaaactttgcatttggtaactgagggatttgatgcaatttttgcagaccagtcgcctgaccgtacatcggtcggttcagcttcagcgccgaaaaagcatagcgcttcctcacgaggccggcgccgtaacttctcgtcgtcaacgtgcaaggattttctccgcaagtttgtggacagcgagcttctgacgtcaatcctagaggactggttctccggtcacagcgaagattgtggtttcaggaagccaggtttcgacgttcctttcgagcttacagagttacacaatttcgattacgctctggagggcgttacttttcagcagctagtacggatgccaagcgctctgtacgcgtcgacgtcggatgtttttgaggccagcgcgtatcttgctctggaggatttccttcacgcaggcgttaaaggactgtggcaaactttctggggtcctgatgaagcgatgccgttctcggttgcctgtgtacacagcacgagctccagattttaccctgctgagaaggctataaacagtggaaggctcgatggtgtttgcgcgactgctgtgctgctgaagaatttgaagccttcacaaggaaggtgggatcataatcgcgtgctggctttgttgagacctgatgtcggaatggtttccccacaaggtgac

SEQ ID NO: 7505 - DNA, 794 bp, Zea mays
aagagcagataaacagtcatggcaacatctcagagcttcctcggcaccaaacaatccattccgtatcagattcgaaatggtctcaccaactggtgaggtgacaagcattggagtactgcaccatggatgaccacaacttgcatttgagttagggttgttacatgggcctggatggatgacccgtccggacgattccatgtgtggtatatatctgctggaaatgcatctttgcttcatcacggtcagtacttttgtctgcctctgtacttggtaccaggagtccatatcctcccatgccggatccagatgagaagggctggagcctacatacagcaaacaagttttggtaggttcttccacaggagcagaagtataaataggaggatcactgcctgttaggatgtcactgatttgaaaacctttctgtgtgtaagcatcatccatcaatacaacagaccctatttcaagccttaaggtttcatgtggtttcacatcaactgctgcttcctcctgtaactcaacaatttcaggagaatgacttcgctgttggaatcgaaataaaccattgccattagcttgtctgtcaaccagatgtctttctgatcttcggctctgtagtcttgaactatgttccgttgccagttcatcgagagaatacttaggctctccgtaaaattggatcatcgagtgaaatattgcgatgagaacctgaagggtcccaatgtctccccagttagcattcccaagtttgttccatactcggtctacggaacagactgaaattctggaatgtt

SEQ ID NO: 7506 - DNA, 785 bp, Zea mays
atgcagacattggcatgcagatctcgaggctaacatcgccaggcttaacaccatcagttattacagagcatatactgctcggaacaccgaggacaacacggcctttgccaagatgcttatcaatcttcttttggaccagattcaggtaagcatcattgcctctctgccgagcataatcttctggggtaaaacctgttccgtcccgtgcattgctccaagcactaattccaatctgcatgggataagtcagatataactatgtcattcaactctatcaattaaatttaaaatatatgcaacgcatgtgatgtgacatctggtaattcatgtatccatcacttcacagttcaatgtatgtgtaagtctgttctttagtgaaataataaaatatcataagaatgatagtttactaagtttctaatgacctactgttgtaaattaatatagctcagcttgaggtggtggaaaagaaaaggcaaaattccaagaactagaaaaaagaataccagtccaggatcatcggtcagcacatccaacacatcctctgcatcactagtggcagctgctatatggaggggggtaatcattgacgggcccagagcatcaggtctaaataagtatgtctgtgcagtccccttggagtttttgtttggtctgtatctcagcagaaatctaaccatgttaacagacttcctccgtacagcagcatgcaacaaattttctgaaagcaccacctcttttggagaacgggatccccatcgccaggcccataataagaatctaac

SEQ ID NO: 7507 - DNA, 798 bp, Zea mays
tacttcttggttgttggccgccaccacttcctccattctcttcctcttgttttttccatctccaaggagtttgcaactagcttttcttggttggctatggacagcatagctttactttttgttcttgccctttgccttattactcgttcttcagcttgtgctttgagctggtctaatcaaatcatcctgagcttcagcgtctgctagctgccggtctgcgttgcactgttgcaagcctaccgatcgatctgtctttgatttgcatctacctgagcctcacatgcatgtgattgattgattgcctgccttgtcttcagcttgagctgctgatgagcccatcctgcttggagccaaaaccacttggttgcacacttgcagtagtatatagtagcatgcggcggcggccggcggcagcagcagcttgaattgcatcgattcagcttcactttgcctctttttttttgatcttatatatcagaatcgtcgtctggatttcgattcctctccattcccatctcgtcagattcagatgccttctaggagtatttatcttcttattattagcatcacgatttgttcacgcagcagcagcacgacgacgaaagcaggattgatatactgatctgatagatgatggatcgacatatggaggacgactcgagcacgttcctccagtgggcaatgaaccatctccagcacccggccgccgccaccgggttttccgccgcataccagcagcaggacggcggcgccggtgttggtgtccgcatcagcggcggcgccggagaccagaggact

SEQ ID NO: 7508 - DNA, 684 bp, Zea mays
acatcactatggccaatgcagctgcaatcactgtcaaagaaagacctatgccagttagtatcctcttaccaagttgtgagcttgtttttggtgaaaataggccatctaagctgtttgcttggttgcttattttcatgacttcaaggccattaaggatggcatcagtattgctggagtcggttgtgcttgggccaacctgcactacaagggtggagttgatgatgctggatgagtccacgataaagtcctggtagtaggctactgcaaggcccattgtcaagcttgagaggtcaaggttggatacacccatcatgccatttatgtagacatcgaagtagaggctattgagtgccttgcttataatgtcacagaaatgtaggcggatgaggtacttgaatcctggctctgcttccatttcccaagttatgttgaatcttgcttgcgaggtatttgttgatgctgactgctgtgccgttgagtatatatttgctggagcaatgagcggtgtgactgtcttgtcatcagggtacttgatagttctaggaggaacccaagccacctgtgctgctgcctcaagcttcaaaaaaggtgcatctggtaaccaggtcctgcccagtgtgtcgttgaaggctgtcacaagtgcaccccccatgttcagtctgtagactacctgcaatgcattgt

SEQ ID NO: 7509 - DNA, 796 bp, Zea mays
  unsure (1)..(796): unsure at all n locations
attctctcacgagtctaatcataggccaggggtaaaagcgcaaatgtttctgcgctctcttttctcccctcaccctttctctttctccctcgaccgccccggatctatctcgccgcgccggcgcgcagctgagccgccgaagcgaggaggcaatcgaggcggacgaagcgccgcaccaaattcgacgggggatcgagcaccagaggcgtagcgcaaaatgttcaagttcctcaaggaggtggtcgcgggatccggatcgggactcaaggacttcccctacaccatcggcgagccctacgcatcggcttggggctcatggaaacaccaccgcggtacctccaaggtacgcttccgcatcattccacactttcacacccgatcgatcagtcccccttagatgtatcattgttttgttttgtcgactgccgactggtacggttcggtagaactggttccgttgatcgaattcggggaggaacgaactgtgcacgctatgcttcgcgtgtgcttggctgtgtggttcatgtgctacgtggctgcatacgctcttaattttgtgggtctgctgcgcttagcgttttgagcactcgagcttttttcgggtaggtgtgactatgttggactattgcaagctttagtaaccctttagaagcacaatcgctggattcggtgtagagttgattcgagtatagtctatagtctggttaatccaatgaagggtatttggttgtactttagattntttgtgatatagacatatagttgtgtgcaggtatttaaacttcgatctgcatgt

SEQ ID NO: 7510 - DNA, 758 bp, Zea mays
cgtttctgctacaacttgtttatatctatcgcagtgctagccgtcagttaagcattgatgatccctggacgacgtggacgccggccaactgtcaggagagtgacttgaggatgagaaacacacgctcgcttcatcgttcgggcaaacctgtcttccacatctcttgaaagctgggagcaggacttgcgattctgagattagttgggcatggcgagctggcgatcatgtgttaatttgtgggttgcaatgccctctctgtgcattattattcagtttcgttggcatatcatccatagcgcgcggtacggtaccgtgggggagaaaagaaaagcagtagttggctgggcatcattaggtttggaaaaacaaaacatgtaggattaggacttgggagttcctaaattgcgacaagaatcaggtcgggtcccattttgatgcagcgttgaagaagctttttttgttgttgttgctgaggttggacttttctgagccatggccaattgaacgtacatgaaaaaccagtcatttcagatcagaagctggaatcccggcccctaggagaatatctttactttcctcgggacaaagtcaatgcacatgacccatcctgtttccactcccatcttctccgacaaaccaaaactttcagcgtaacacaatgttcaaccccaaggtgtaaacacgtacagtgagaaaaattgaaaaaaaatcaaatgactatgttctctgcttgaaaaatagtagaaaaatgtcatgta

SEQ ID NO: 7511 - DNA, 773 bp, Zea mays
agttaacaaagcaaatgagacaatatcagttgttgacaatctgaaagttggcaatggtgcacatggaaggacgaacaacaaagagaaacatcggatggttacctgagccagatatggaactgagatatgtatgtttctagtgtaatctttccaagccagctggaacagccaaatgaacaaatacaggagtcacatattcgcacaacaatgacaggaaggttaaagataaaaggtacagtgcaatacacaaccaaaacttacgcaaatagtgtgagggagaagcccctgaattcttgagtgaagttgcgtagacatatgtagacacttttgagtacgcacacaaccatgcagcaacaaatcagattttgcaacttacagaccccccaaaaaatgtatcagaaaggtcaaaggtagggtacatacgttatggggatccaggatgtatatggatgcaacttgttgtaagtaatcttatccagcttataaatgtattcataccacaaataaccagcctgcgatcaacacacagcatgtgttattgaaaagtaaggtgtttaaaaaatgattaggtgttttgataattaccatcattgacactgtaactattgaggtcttaatatagagtttggttctcatttcagtttcttccagcttcttcaaccacttttaaacctgagacaggatatttcatcaatgccaaaatacaacttcgcttacgctctttgaaacaattatgtggttgcccttcaaggggtctatgaatctaaagaaac

SEQ ID NO: 7512 - DNA, 816 bp, Zea mays
gcctcttgctgcctgcagtgtttcctgggtctcagaaacgatttttttaatagttgcccataaacatagtttagtgagtagctacagttcgtgtatgagcattgatacatcagaactatagaagttggtgtgtgcagttataagcatctgctctcatctggcacagctaccatagtagcatgtatgatttatcacctcttgctggtccattcatggttatgcatctctcttgggttgcaaaaaagctaattataagtcacacctattaattgacaaatatggggtttcacctgtcttagcaccaaagttttgccatgctgacttttacaccacactgccttgtgaagaactgaagattcatttctccaccctaagttgcgtgtaattttaatttgctggagaatttccttttatggactgtaagatactgggttcaacttctgtcctactactagcagcctgcaactgtcttcagtattactttatctaatttccaggtgctattcttgatgtaccattacttcaatgctaaagaaatctacaatgcaatccgtgtggtcattgctgcatatgtctggatgactggatttggcaatttctcttattattatgtgaggaaggatttcagtcttggaagaattggtcaagggcatttatacaccccactggtcctcgatcttagttgaggtttttttacatgggttcaccttcaacaggagatggggcgcctcaaattctttggtgtatttctgcggccttgttctgaaccatgattatcccccctatagtgtgggcctaagcccaacctttttaccc

SEQ ID NO: 7513 - DNA, 774 bp, Zea mays
tttgccatgctttctttcactaatactgtttcctcgtatctggtttgaagaatctgctggccgccggcacggagacgacctcgacgactctggaatgggcaatgtcgctcttgcttaaccacccagacgtgctgaaaagggcgcaagaagagatcgaatcgaacgtcggaagggaccgtcttctcgacaagaacgacctcccccgcctgccctacctccactgcatcatcagcgagactcttcgcctctaccctcccacgccgatgctgctgccgcacgaggcgtccaccgactgcaagatccacgggtacgacgtcccggcggggtcgatggtcctcgtcaatgcgtacgccatccaccgggacccggcgatgtgggaggacccggaggagttcaggccggagcggttcgagctcggcagggcagaggggaagttcatgatgccgtttgggatggggaggcgcaggtgccccggcgagaacctcgcgatgcgaaccatggggctggtcctgggggcgctgctccaatgcttcgattggaccagggttggggatagagaagttgacatggcaacagccactggcaccatcatgtctaaggctgtcccactcgaagctcagtgcaagccgcgagcgaacatgtctgctgttcttcagaaaatctagagtgagattgtgaatatttctagttgcagataaacgatacataactatgcaatgcttatatatagtgtatagtagtatagcagtttcttcattttaaagttgtacaatg

SEQ ID NO: 7514 - DNA, 771 bp, Zea mays
caatcttgcatgcctgcagctgctggccaggctatactactagagagggacgccctcccttcctctcgcttggcttacacttctccccatcccccaacacaaacccaacacaactccgccgtgtcgcctacacgcactggccacgaccaaaccctaggcgccgccgcccccggggcccccaggtacgcctctcgcctatccgccgccgtgattccgcctccgcgccgccgtcgtggcgctcagcgactgagagatacgcactagggttcgctgcgatttcgttggtaagggtgatttttatgttttatttttgttccggtgtgtgattggatcagggctgtcgtagggaggagaaggaggaggagatcggtgaggagagaaggggatttatgtcccagcgaggggacaggggcgaggggcacgccaggagacccggccggtccagcagcttcggcggccaccgcggaggcggagtcggtggcgcgggcaagggcggcgcgggctcctcaggccagcctcctctctcatccaaccgcaggtaaattactgccatatttgattctgattgccctctgcctctgcttcgcacgattggttgatctcgccagggatgatagggttttgatgagaactttggatcttgattgcagctttagaaagcctggcaatggccactgtgggcaccagaggtgtggtgaaccagcccgacaccactggctttcagcctgcaccagcgcctggcacccacaaactcctgtgcgcccgccacct

SEQ ID NO: 7515 - DNA, 842 bp, Zea mays
agcttgcatgcctgcagaaagtgaccagtaaattcattgacaacttcatatatttcaatgacttaacaaatgatacggttagcttgtgaaattgtaatcaggaacttacatttgtatctgtgagcagtcccagggaaatcagtgatgatcccgtccaccttagcaccttgcacataagcattaatctgtgaagtggcgtctgcgaagaagtcattcggctgagatgcaaactcattcatgagcacatagacgtaaacttggaagcccgcagactgaagggacgtgacaagcttattggtctggtttgtcaaataataatgggtctgtggtaaaacagatgtggtgctaacagagacggcattagcaaacttcttaatgtctgcaagggatgaaggtgcggcatctctgacaccttcttcaatcatgtagacaaggctgtacttggtttcctgcttgaacttctttagcaccgagctgttggttgactgaatcataacattctgggcagtctgtttgctataaccagagtcatcaagtgctttgaccactgcgtctaccactccaaatccaagcttctctgccatgaatgcagcatgctgcaaatattaaaaagagaagggagaatgaggtgaggtgaggactggcaagaactccaccaggagacataaaaaggggattggatttgcttcagtaatccttttgtagagaaagttcacagatttcaaaccattgcaagtgttaaaatcacattatttattttgacttcaggttcttcgcaagcaacattagacttagaaatgctagttaacccagtgaaggattatattagataaaactttatg

SEQ ID NO: 7516 - DNA, 863 bp, Zea mays
cttgcatgcctgcagtgccgtggcctagctcctcgcggcctcgcttattttcatatttcatttctctctcactctcgcaaactaagcctagggcctgagtttggtgaacaaaccactacaatgcagaccaattaactgatgatctattgtgttgtctcataccttggcgagcattgaagcactactcttgaaatgcttgttttatcatctttacatataatgcttcttttgttttatttactcctgttgtggtcaggagactaccattcatcatgtcattacttattttaatatgagtctggctactcttgttagtgcatttcctgtgaattggtgtagatttgtatgcctctcacactctcgatagaacataacaattgatgatactgcatttatgatattactggttgtccttctcatttggttagttagttgggtcatgctattgtgttatttactaacctaggggttctttgtatatttcttgttaagacaagccattgttgatgagtgctatgcatctctggtttgtatcgatgtgtctttaatagcatatagcatctgctgatgtgcataaacatgcaggatgcttcatcgtattcccttgcttgtacgttgttttttagttgcttataatccattggagtgacatagtttatgtcagttctgtctatcgccagtttatcaatatcaacttgtgcggcgattccacagatttgtagctactatccaaaggacaatggtcaaaaagcacagttttcctaactctaaccgctagatgtcatcatgttgatctatactggaaatgctcttctacgtttttcatttgggttccttgctggtattacagggatgaataccca

SEQ ID NO: 7517 - DNA, 829 bp, Zea mays
gcttgttgcctgcaggcaagcaaagatggccggtgtaggagctgtagccgccgccatgttcatgttcctcctggtcgcgctctccgcaccccacacggcgtcctctctccgccctggcgccagcctcggcacgtgccgcgccagcgggtacctcccgggccgctccggcaactgcgagaagagcaacgacccggactgctgcgaggacggcaagatgtacccgcagtaccgcgctgctcgccgccggtcacggcgagcaccagggccgtgctgacgctcaacagcttcgagaagggcaaggacggcggcggcccctcggagtgcgacaacgcgtaccacagcgaccaggagaaggtggtggcgctctccacgggctggttcagcaacatggcgcgctgcggccaccggatcaagatcagcgccgccaacggcaactccgtgtacgccaaggtggtggacgagtgcgactccgtgcacggctgcgacgacgagcacaacttcgagccgccgtgcgacaacaacatcgtcgacgcctcgccggcggtgtgggacgccctgggactcgaccagaacgtcggcatggtggacatcacctggtccgagcagtgacgagaggactgcgtttgctccgtctgttgccacttgatacgtgccgtgtacatacatgatacattacatatgattagaggatacaggtcgtgggctcattgccttaactagtgtactgtatgcatgccatgtcattactgtatatggaggatgtatatatgtcattattgaatattgaataaatattcttgtgcactttttaatgagttaaaccgtacag

SEQ ID NO: 7518 - DNA, 806 bp, Zea mays
agttcttttcatggtccagtatatctgttattacttaatatcttagttaccatattttttttgaggggaatagttaccatatctgtcagctatgacacagtctgcggtaaaagcatatgtgttcactgtagattttgggagggaaattggcttacctgtactctcatacattgttgccttgctggcaacatggttaaccaatgacataacatgcaaactgtatctttttactatttaccttaaccatgccagctttttatttggttctaggcatctttttattcttccttgctgtaatctactggattgtagcatgaacaccttcatgcgttttagcttatgtttgttgttttcaaccagtggtggcctgtgatatgtctactgtcaaatctgggacatactatgttgcaggcttctctagtccgtatttggctccaatctgtactagaacatatactcatttatctggtctactggtttaccaaatcatattacagaatagttgtgtgtattttgtgttccagcactttgttcactgaaatttgaaatcccagtttcttactcacattaattaacttgccttttcccctcaagaaagtgggcggaaaaagtaagacaagggtaatgctggactacagcttgcttcttttccttttatgcatggtgatgcttgataatgtcatgctgagaacttaattagttctattgatcttttttataactctcacattcttccactgcaactgtattttcaagttatcttaatcctgccttataattggtctccttttcttcaacactttaag

SEQ ID NO: 7519 - DNA, 758 bp, Zea mays
tagagcggatgtatcagatctgccgtcaacttcctggtacgcatcaggtttcggctgcgcgcattcttgatcaaaatcccaagcagcatcctcttcacaagccggcacctctaaatcaatcacaaatgctcgtttaggatggttgttccgtgaaggttccgcctggcattcatgtgacactactgattcttcagaattgtcatcatttggcacagcatcattgagatcgatgaaattcctgatggaggcaccacttatcttgatgactccatcagcatcttgtccatctttaggcacatgtttctggcatgaaaggggtaaacatgtagcatcctcttgggctttattacaaaccagcaaagttccagtggcaatgtcttctgaaggcccatccttcttaattccacagccaagagatgtcgaagcagagtctgacaaatttcgaatagtcacagctggttcgttctggtctttagcatttttcagctccattgtagttccaaacgaatggccaaaaatcttccctgccttctccaaagctgttggatcagcagacacagctttatttttgagccaagagatcccgaatactgaccctccgtctttaccatgctgaaaactggcagcacatctcccatcttgttctacaagaccatcttcctgacaatctgacagtgtctcattcaaattgaagttcttcatacccttgccctgggactgttgatctgaatcttcaaacttctgggagttcttttgct

SEQ ID NO: 7520 - DNA, 829 bp, Zea mays
acctgctctttttgcgccggctcccggtgggggcttagcgtggtcgttccaatgggaatatgatcgttcttatagcgtgtgtggcgcggactatctagttgtggatatttggccttttagccttgtaataggggttgacaaatattgtccccctacctatttttttctccttaatgaaatgacacacagctctcctgtgtttgttaaaaaacacaccaaatgactcttagtagcccacagtacacgcggataaggcaaaaggttaaaaggattactccacacagattaaatcaaatgataaagtgggcctaataagcctctacttgttcaagaagtagaaatagaaagactcactggcaaaagcatgagtattcctataggaacgacagacgccaaatctgtcaatgttctttgaagagcctgcttttccttctgagttagttcatccccaataagagctctttttagcaaacccatagcagctcctgtatcaattgctaatagttgtgtcccctgcaacacagtctgtgcagaaaaaaatatgaataaggaacaagtttttctttaaactagtacagtgggaagtatggagctaacaatactttgagtgtgtgtttgtgtgagtggtgtttaggtcattgtaattatcatccttctttgaatgaaatgatacgcagctctcctgcgtgttcgagaaaaaaaaacaatactttgatgagcggctttggattggcaaatagtcttttggataaagttaattcgattattcaacccccctactacaatctttcacaatgataccatgtcttcaagtgtcattatcgtcagc

SEQ ID NO: 7521 - DNA, 830 bp, Zea mays
cctaatagctaaagaaacattaggggtccaattatcaaagacacatttgttgcgatcatggtttttaaagcggtaaggcgagacaaggcgttggatcacccgcctggatgcctaggcgaggtaggcgggcaaggcgcctaggcgttggacctccgcctggacgcctaggcgacgccttaagaacagtggttgcgatttccaaataatccagccccccaatgcaatgagagaattgagcccctttctaataggtccattgactgaacatgaggcttcttcccaccagctcatgaaggaagacaatccaggctgaggggctagcacttgaagattgaatctcctcagtagctgaaaccagaaatcccttgtgaaaacacaggaaactaggagatggtctaaggtttcatcctcttgatcacataaggggcattttggtgggtgatcaagccctattttagcaaacctatcagcagtccagcacctgttatgagcagcgaaccaaaggaaaaaaaatctgcatttaggtggggcccaggttttccacaccctagaatagtggctgaaataaattgatcccatgaagagcccttcatatgccactttagctgaataattaccatctgaggctatgctgaaaacatgtttgtcttcaatttcaggctgtaactttacatcagaaagaaggtcccaaagctgtagatattccaccaaaactcccacagagagagctcctttgatgtcagagatccatctatttagaagagcctcctgaacaagtttttgtaatcctccttggaatgctttggaaacagcctgtgagcgaaatcaca

SEQ ID NO: 7522 - DNA, 836 bp, Zea mays
tcggttctccgcgatcctctatttcgacctgcagttgttcagagcagattcactactgtacttactagtgtatgcacaacggccactgctaacgacaaaaactattgagttggtttgtctctgaagtctcacccacagtcattctttgattcagtatggtggatattttactgcaattggttttcaggtggggtatgataaacttggcgctgggcagaacgccactgttgctgtcatgggatatagtggttatgatattgaagatgcaattgtgatgaacaagtcatcccttgatcgaggatttggccgttgcatagcattgaaaaagtaaaattttacttccaaacagtgccatttagtttgttttgcttgattgaagtgcttgctatcatgtctctagttctgctggtctcatatatatgtgtgtgtgtgtatgtgtgttattttccacttacaggtacacagttttaaaggataactatggagatggtgtatccgatatgattgttgaaccccaaagagataatggtgttttgattaaacagaatatgagagtaaggatatggagtcatcactgcccatattttttgactattttgttatagctgtttcattttttctcacctaagcatgttctagttgacactaacaatatgattacttattgaaaggcgttggatgaagatggaattgctggacctggtcaaattattcgcaatcatgatatctatgtaaacaagcgaactcccaaaaacacttcaaaaggtattggtagggcattgagagaaaggtaaggatcctttccccttgtttacttttctttgtttatgtgccta

SEQ ID NO: 7523 - DNA, 810 bp, Zea mays
acattgctccagaggtggctgccaaaggaccggatcagcatagatggagacataatgctcaggaatattttcttcaaaatctcgttatcaaagcttgtttgctggttcagctccctttgaaccatggaaaaggctttggaaaacctaggctccttctgaatgcaaattctttctttggttggctatgaagaatagatgctggactgctgacagattagagaagagaggctttccgcacccggtggtttgccccctatgcgatcaagagcaggaaacaatccagcaccttctcacctcttgtatcttcggccgtcggttctggcacagtttattactcccttttgggctggatcatctcacgccgactgatgatactccttcacagaatggccgacagtttgttgggttatggctggtgctaagggcctaggttccttagacctagctagggctttgaatgtggccggttccttggccatctagctccttgattggtatcttctgttttttcttagcaggtcatcatatgctttgtaccccccctccctgggtttattctctttccctcttatttataaagatgtgcagttctcctgcgcattagagaaaaaaagatgctccacttctaccttgagtttgaagggactgttaagtctattaaggtcgatatactatatagacccatatggcccatgaagttctttatataatgtcatatccactacttggaacatcttttaatacccccatagtttcgtgccaggtagaatgaactagagaaccaaattatatttaatttagagcttagct

SEQ ID NO: 7524 - DNA, 813 bp, Zea mays
acgagtgtcgtcttggtactggttaccccctaggttctgtggtaccctttagggcttgttcggttattttcaatccatatggattggaggggattgatatggattgagagggattttgacttactaggaattgaaactccctcaatccccctcaatccatatggattggggtagaaccgaacatggccttagcgtttttctgcccgctgaataaaaagggggttggatatagccctctatcatatatatacaaattgaatagtctgattacacatactgctaagggcctgtttgggagggctcccaaaccagctccggctcctagaagagccctcccaaacggtctcaaaaaaagagctcttaacaaagagcactaagaagccggagccatttttataaagagaagccggagccaaaaaaatggttcctagcggttcctcacctcactcctctatcttactcttctctgacgtcaagaggagccgttttgccaaacgatttgttaaaaaaatactagctactatagaggagctactcttgaagagaagccagagccagagtcatttttggaggagctggagtcgtgccaaacaagccttaagtgtgaggacaggaattgaacccatgacctcaagaatatgagcctcgaggtaccaaactgttatacccattgtagggctgaaaaagtgtagatggtagaaaagattgaatacaactctctaccatgtctagacaaacaattagaacatttacagaatgcagcaggtaacaggaatcgaacctgcatcgttagcttggaaggctaaggtttat

SEQ ID NO: 7525 - DNA, 837 bp, Zea mays
acccaaacaatcaatcactttttggttaataagagttggtaccttgtggatttgcctggttatgggtatgtttactcttttctatcacactcaaggttttctcgttcatccaaaaattagtaagtcaaattgttcactagtgcttcacatgctatgttccagaatgggagcatcttgtgtttcccccctcttttacatatggtgattacttgattaggaatttaaccctgctgatgcactaccttttccccactcgtctagttccatagccagaatgacattctttgtacgacggaagtattatacatttgtggtactcttgaattttggcatataagatattcttctagaaccattgtacacagcagctgtgcatgcaaatagcattcctatattctgtgctgttttaacatagcaatagaatagtggatggaaaccattcaggttcaaacttctgatatgaaaacaaagtgacataaatattttgtcctgaagttagcctgttaatgtgttagttctggaagcccaattactatgccttttttcatgccatattggatagggcacaagttccacttgcaccaattgtagttttcctttggatagcgtttctgattttatttgctggtatcttgacccttgatattgtaacaagtgcctctgccttcagcatgaaacaagaatgtttaacagacactcaaatgtgttctatatttcctttttgaacactatacttttaaagaatgtttaccattaacctttacagcggtttttatggggggtattaccaaactattttgaacactattttttccagcatttttttaagggtctttt

SEQ ID NO: 7526 - DNA, 814 bp, Zea mays
ctgcacggaggttagttccaacttccaagcgtgaaatgaagaccatttacatttcaccatattattctcaattcactttgtttcttcataaatcacaaaagatatcacagccaactcaactgcctctgccccggcaaaaacaactccaaagacctataaaactgtctcttcacccgcccagctcctgataatccgaaatggagcagcatgtatgtatattaccaaaaacaagatggaaaaaagcacaaacacccgctgctccaatagcacccgtaaataaaccaatgcacgcatgaacttgacttacaaatagcgtgcggtagcagaccagacaggacaaagttttgccctaaaataactcttacaaaacaatccgaccaagaatgaaatgcaaagacaatgcaagtggatgaaaggaaaagaatgctaggaaattaacatcctactatcagcatggacttggccaccctgatcgatacaaaaataatcctgtgacaatgcgtttgagcccgctcttgcttactggagcagcagcaagcaactggacctgttgtcccaagtgaccatccgaccaatgttcaatgcatgagatgaatgcaaggggaaatgataggccacagatcatacgcttgacatgccaaggaaactggtcagcatgtcatgcgacaatagaagctcacatctcacctccaataagaaatgaaggttgcagatgcctttagaaaaagttagcagacggccagcttgaaccctcttttctcgcagaagcaagaagggcgggttgacacatgtagtgatgcatgagctagtgagg

SEQ ID NO: 7527 - DNA, 1200 bp, Zea mays
ttttcaacaatacgttttccccctagattcagtaagttcattgaacttttgggtagacatgatcagtgaagagtaaagacttccccaggtatgcaaaccctagcccctaggcgacagtatataacatgactagatgtttagaatctagatgtagaaatatttaggtgcaaattagttaaattgattgatgggtacattgttgatgcattatgtacttccttggattgtgaagaaggattgagatatgaaaagacagtaaagtttctgcggttccacggacgtcgtgtgtcacccttccacttcccgctttatgcagcaaaaataaggtaaaattgctttatgcagcaaaaataaggtaaaattgtgcacaactaaggattcaaaacttggtggtgggctccacattcacatatatctaaccaacagagcaacacatatttttgtgttttattaaaacaaagtctactcatgtgatatataaaaatcatagcaatgtacgggcatctaactagtattgtgttatttattagtactcccttggttctaaactataaactttcctagatacgtagctttttttatgcacttacatattacactgtctataatctgtctagatacattgcaaaagtaatgtatctagaaaaaacaagcgtcctataatttcgaacgcattatctgtgtagtgaattgtcggcaaatactttgtttgttcatcgatttcctaaatgtcttttacccgaattacatgtgggaaaaaatggatgttggcttacccccagtgaaaaattcattaagcccgccacttgttcgggggatggtaattacaagtgacggaaaaagacccttaaggctgttacacttgattgaccttcagcatccctttctttgagctttaaccgccttgcgtggaggaggaaccagaagccctcattggttggttctcccgggaaggtatgctttctggactcctctttgaccaagattttgccttccataaaaggaaaaatgggttgtgcgcggtccctggcaagatacatcagtgcatggcggctggggatctcaaagaagacgttaccaatggaagaaatcaatttggccctttcaactatggtgacccataagcgtttggatagaggcacgacttaatttaaagtagcaccgcctacaccgtatgaggatgcgcacaaccgcatgtgt

SEQ ID NO: 7528 - DNA, 741 bp, Zea mays
agttttatactacggctgggtattttgttgtgaaatgctacctgtcatcatatagtagataatagatatatcaacctgattataaaaactcagaagtatatttagtcaaacattatttgttattgagaatggcgttatttacatcacttactgaatttttctcatgtggttcgttcaggtatccttttgaggctataaaggttgttacttcagatgggtatgtcgtgttactggagagaattccaaggtgaaaatcgttgactttctcgtgttattttatttcctgatatttatggattaaaacttgatgcattacctttttaggcgtgattcgcagaaggttgttttgttgcaacatggaatattggactcatctatggggtgagtgatggccaaattactctattggcaatgttattgacattccacacaagtgacatttgcttcagttttgtgtgtttctgattttttttgctgatacccttttctaccatctgtatgatccaaacttatagtttcgccactttgcgagcatgttatatcatctattgtttcaaaaaaagttgtattgagttgtctaattgtatggacagtcagacaatgtaggacctctaacaaatggcaagatcgtctatactactaggcttagctattatagctgtttccttgtttatgggtactgattagtaaatagccaaaagttaaaagtatgatgcagcgcaatagatgtctttattgaaa

SEQ ID NO: 7529 - DNA, 817 bp, Zea mays
ttgcatgcctgcagacgcggcccgtcctcgacgcgcgcgccctgtctgccgtcgtggcggcgctgtgccggcggtccgtggacgcctgccgctgggccgacggctaccccctcaacgtgcacctgtacctgaccctcctccgcgccgtgttcgacgccagggacgagacggtggtgctggacgaggtcgacgagctcatggagctcatcaggaagacgtggaacgtcctcggtctcaacgacaccatccacaacgtctgcttcacgtggctattcttggagaagtacgtgacgaccggggagacggagccggacctgctgtccgcggcgctggcgatgctcgagcaggtccgcgacgacgcccggagacaggccgaggccggcacgctggaggcggcgcacctcagggtcttgtcggcgactctggcgtccatgcactcgtgggcggaagaaaagctgctggattatcacgagtcgtttggtgacgaccaaggagctggtggctccattggtgccatggagaatgccgtgtcccttgctgtcttggcggcagcgatgctcagccaggacgtgccgtcgtctttcgcagtggcggtggcggctgccggcggcgatctctcgtcagctagatcgccttcgtcattctcagccagggagagggagatagtggaacggtatatcaagtcgtcggtgaggcgtgctttcaccagggtacgtatatatgttgccctagactatatatatatacgtatccagcatatcttctgctggcgcatgcatgcgggatatatatatgtaacaagcaagcatgtgtggcg

SEQ ID NO: 7530 - DNA, 818 bp, Zea mays
tgctcgcctgctcctacagcaacgccacaccgcttctttttttttaaaaaaaaaaacagagagatagagagaggtccggagatcgcgttcatggtgagtttgctggctccccctttgactctggagactgaaaccctcccatgcttccagccttccacccaccaacagaaggtgaccggccgcacgaatgctagattgctagtgcggttgaggtggacagaagcagagccagagccagccaagtgcaggcagcgaaacagagactttccaactccccactgatgaatgatgatgatgggtcgtcatgctctcacgcacgcacccagaacaaaagattcagcgataagcagtattgacaagcaatgaagcagcgtaggttcgaagcttggacataacccatattcaaactacactttataaataatgtaatataaaatataaaatagtgtaaaacaatattttgggtgactgaactgctgagagatggatatagaataggactaggagatactgatgcgcagttaggtttctggtacactgaactgaacagtgcagggctccatcccaagccccgcgacaattttatcatttggtgtgagccggtcggtagtagctggggtttggccaggcgtttaggttgcgtatccaccgccggcgaaaagctttggaattttggggaagcttcgagctggcaggacgggagatcacaaggatcgtcaagtgtcgcagcaagctagcagaaatgaaccgcatgttgtggttagagtttttgctggggttcttatctctctatatatcttggaccgggttctcttgtg

SEQ ID NO: 7531 - DNA, 826 bp, Zea mays
ctgcaggtaactgactccacacttcacagcgcagcgcaggcgcagcacacacccatgacccatccttccttctcatggctttggctttgctctgctctgctttgcttttggctgctagtaggtctttgcgctgttcttgaggccgaagaaggagcacaagtaccgggtgtactggaacgcgtaccaccactcggtggggtacacggtgatcgtgctgggcgtcgtcaacgtcttcaagggcatggccatcctggacgtggagcggaggtggaggacgggctacgtcgccgccgtctccgtgctggccgccgtcgccgtggcgctggaggccgtcacgtggggcgtcgtgctgcggcgccggaagcaggaggaaaagacctccaacgccggccgcttgccgctgtctatgtaatatatatatatatacctcatcgtcgtcgtcgtcgggggcgtctcactatatatctatctgatctgatctgatcttcagagtagtaggccttacgatgggttgggttagctagctagtgtgtgtatcttcattgtatggtaggtgtctctgtgtgtgtgtgtatactgcacgttcgtatactggagatgagtgagtgtgataccggccggcggcattggtctttggctgttgcctttttgtttctgttcgttcgtgaatgctgatctgatcatgcacttgcgttctgggatcatgctattttgggtgctgctccatctcgcaaagaggagaaaaaaaaagctggtgaggtgtgctcggtcaataactgtaacttggtggttggaaaactgggatggaaacggaccgtccacgtag

SEQ ID NO: 7532 - DNA, 906 bp, Zea mays
tgcatgcctgcaggtccgccgtagcgccggcgactgggtcgacgtgcgccccgtccgcgacgccttcatcgtcaacgtcggcgaccaagtccaggtaatatagcaaccaacatcgttccagctaattaagctaggtatacatcttgtgcatgttggctgtatcgtccctactctctactatagctagcgtgcccgatcgcgcgtcgtccacagctcgtctagatgcgtggcttcctggagctacgtactagtcgatgtcgacgacagatctctgtcacgtattgtacaaacgtgaagtatttggtcttgtggttggtcggcactcctacacgcgtacagctagttagtgcgctgccgctcgccttgcatcggttggaatttaaaagaatcgatagctagctgcatctctggatagataactcgtgaatgattagttttattaaaaacactttaaggacaaaaggatccgatcgatggatcttatctgtgtatactatacgtcaggaacagtcttaattcagctctgcttataaaaaaaacctgtattaattcagcaggtagttgactctgaaacaaactaatcgtcggtgtacgtgcatgctggaatcaatactagatagatgctactagctagtactactcctatatcagtactagctagtagtttgcatgagaacacatgcatgggcggtgagccggtgacgatcatcgatcgagcgcaatcttaagatttatcgtgcacaagcagcaaccgaggacagagttgcatgcatgttaccgtactgtacggtgacaactgacgaatcgcgcgcaccacgcgcgaaagcacatgcacaggtgcacaagccaatcatctgcatatcccacgtatatgttgcatgcacccgccggccagccagctggcaa

SEQ ID NO: 7533 - DNA, 792 bp, Zea mays
ttgcatgcctgcagatacccctcatggacaagcttctgaacagcggtgttgacatcaacttagttgatagagtaagttacgtgcttatgattttcattcttcttttgtatcagagtaaccccatctgcgaaggtatagttaactacataagtgttgctgatacaggatggcttcacctctcttcacaaggctgtcatagggaaaaaagaggctgtcattagccatctcctaagaaaaggggcaaatccccatgttagagatagggtaagagggtacctggaatagtcccttcttgtcaattgttgtccaagtcctcaaaaagagtgaagggaaactttttgaagcaaagttagctcgtcacattggttttcgttagtcggggacaagaatgctttccctctatgttgaattaagtctgcctgatgcgcaggatggagccacaccattacattatgctgttcaagctggtgccctgcaaaccgtgaagttactgattaagtacaaggttgatgtcaatgttgccgataatgtaagtcaaatgtgtaccgattttcataccatctcaagcctttccaagggcagtgaatgttctcttaaataatgttcccttccatgcaggatggatggacaccactccatttagccatacagagtaggaatagagatatagctaaggtcttgcttgtcaatggtgcggataagacaagaagaaccaaggtattgtttcatatatttgctgataagcaatatacaccaaaagaaatattttactgtgatcgctgccttacgttt

SEQ ID NO: 7534 - DNA, 785 bp, Zea mays
  unsure (1)..(785): unsure at all n locations
ggagtgtggcctccgtttatccgcggtgtctaatccagcatcaccgtcagggattatcccccctacatttttttttgtgattatcctcttcctctgtccccgcggaaggccaacacggcccgcccaagcccagcactcctgacgcgacgcgacgcagatatgagatatcttcccccctcgtgcgcgggacccacctccatcacatgacccgcgggcccggcgccccacgccgaaatcctcaaaaaaaataatattttaatcagatttcgcttggttcccagccccccacgtgttccgcccccgccacgtcaccgtcccccacctactactacatgtagcgcatcaccaccatgctatgcgctgcgctgcctccctccactactacgccagccactctgccttccctcccccaccaccacaagaaccgcttcaccattgccgcgtccagctgagcctcctcttagccgcgtccagccaggagaaggcgggcgcgcacacctgctgcttggtgaccacgttcgatggagctgcacaagtactggggcgtggggggccggcggtgcggcagctgcgagggggccccggcggcggtgcactgccgcacgtgcgttggtggatccttcctctgcacgacgtgcgacgcccggcccgcgcacgcgcgcctgggccacgagcgcgtgtggatgtgcgaggtctgcgagctggccccccccgccgtcacgtgcaaggccgacgccgccgtgctctgcgccgnctgcgactncgacatncacgacgccaacccg

SEQ ID NO: 7535 - DNA, 756 bp, Zea mays
cattaataatatttgaattgtgatgctttccctttctagtcatgtgtggttgatacttgttctttttgtactagcacacatagttatattctgtcatagtatcagggtttgccacgtgctaactccctttcccttcagttagttgatcacattttattggtaaacacaggggaagctgtacacgatcatggaaatatgccgtatgtttgatggtatttacaaagagcatctggatggagtgtatgttccaaacaatatttccacagtcactttttcagagttttatttgacatgacttgataacatttttaggttctgtaaaaaaatcctcaaatcctagtaacatttatcgtctcctgttatgatgtttgatgcagagttatatattgtaatgcatgtagacagtctgctgaagattttgtttagtcagttttgtcacagtttaactagtaccatgaaagtttgatgaagctaggaatctagagcaaggggagagacgacccctaaatttaatcttctggtgcaaaattgaatgccattcaggggctcgtatgtttttcttgcttgttgtcgaatcattcttgttgaacctctttatttatagtcacattgtaatattgaaaataccgatgtgttactcagacaaagcttataaaggtgttaaatgaataacagaaccatttttctgctattctgtgcaatttccaatgagttcaacttgtagcagagatatatacttaaggcgcgttacatgaa

SEQ ID NO: 7536 - DNA, 780 bp, Zea mays
tttcctcgagaatttcaagctaccaaagaattgttacaaattcagaaaaaaggcactgaactgaatacgctattatcgagcttgatcttgtcttctgaacggtgggagtgggacacatgaaaaaggtaactaacaatgtaaagataaagcaaaatacaaaaccatgaataatatacttcatttgtcctaaaataaaatttattttagttaattaatatgttcatacatgtatatgttatatatgtagatctttatctatttaaatatatacataaaaagtaagaggtaaaacaactaatattttgagatagagggaatacaaggttattttgttatgagcaaaaataatctcgtcagaggacctttccgaacatgaggaacattgaggacttcgcagaaaaagtcgaaattctcgcattccttacaatagactctatgaaatgaaaaagagatatttatttaatcaagccaaatcagaatacaattaagtaattagcattctataaattgctctttttcataaaatcaataaagttaataataataaattagacatagatcaattaagttattataattttatacataatataattatgtaccactgttagccatatatgagtgagataattatgtgctatatcttcaccataggggagcaagttaaagagtgtgttataaattatagagtaaaattataatttggagatataaagttaattttcatctcactctaagaatttgtggtaggcttatatttaaactttctaagtggtagaa

SEQ ID NO: 7537 - DNA, 767 bp, Zea mays
tttataaaaaaaaacctgagaaactatggttgcatctacggttagatcacaatctaaaggcctagcagctcgcttgctggcgatgggagtagcattgatatttttttcatcatgcgggagtaatcccttaatactgttataactttagtatacttagggaacaattttcgatgccaccggtgctacgtagcagccaccagcagagggatggtttagaatcaatgtggcttgaattcatagctggtgcaacctggcactggcgctgtagaactgttttttacatgttgtatacggatgctccttgaccttaatcatctcatagcaaattttgttgggtgtactcattgttttgctgcctaagtttggtttgtgtgtacaaactagaatttaaacaataaaagcatgcaggtggcaaaaagtcatgaagaagccttctgatgaaccagctgtatccgaccatatctgacaagttattagtatcagccactagcacgtgtgtgaattttagcaggaccatactagttagcaaagtagcaaactactatcagtggcactgggtaaataactactttggctgttgatatccttgagcagttgaggattaagcagttgtccagcatgaaccagcaagccaaacataaactattcaacttccattattattgtcaaaaaagaaataatgatgagtaaaaggtattcaaattcattgcctggttcacttttgtagtcatgcacaatatggaatgaaataggcatcaatactcgat

SEQ ID NO: 7538 - DNA, 782 bp, Zea mays
acagtaatggctaccagcttgattggcaccggtaataagtttataaacaccagaggctgaatcccaaatcctactacgcagctaatcacgctcacaattaattgttctagctctatagcgcactgtagctagcaacactagtcgtactacactactactagctatgactactatccaaacgagagatgcagaaagcgatgaaggagccattaacggcccagactttctttcatcatatcagcaggtctgtcaacaatcgacagcgcgaatgctctctctctcagtctctcgttgtcgggggttccgaaagggaaagcgaccaactgaagctgaagcgcgcgtcgttgtctccggccggcgctgctgtcgccgcccatcaccagcgacatcaaggccggcacgccacagagaattgaaggccgggcgggcttcatgaaatcatcgccagccgcaacagtcgccaccactcacaagcgcccaagcttacgtgaactctacgtgaacacatctgatcgacgatgcctaaccaattaattgccccacccatcccaaatacatgttgatttcttacaaaaaaaaattgagtatactactcttataaacacgtaccatcaatgaaataccgatgatcgatgaggctatgatcgatgttgaagttgacagaaccacataaagctaaaactaaaaccatgactcgatcgagcgcagtggtgcccgcgcgcgtgtgcatgcatgcgccaagggcaaaatctctgtgtcgggtctcgtattcatccgatcat

SEQ ID NO: 7539 - DNA, 812 bp, Zea mays
ggcacccgcgattctctttgtcgacctgcagcacacgttccggtactactcccaccactggaggacctgggccgcgtgcttcatccagcacgcctggcgccgcctgaggaggaggaagatggccaaggacctgagtctgagggagtcgttctcgtccacgggaccgtatgaaggcgatggcgacgacgcctcctcccctgaacagagtatcacacttaggagaggagccggcagcatcatcagggagctgcctaagttcaggaagccatcggagccggatttctcggcggagcatgatgactgactgactggcggaggactgagtggctgatacattgtttgttaaggaggcaaaagattggtgcttctgatcggttgttcatactgtacatacatatgtagtggtgcttgtcattgtattgtagggatcccaccgtagattagaaagattgcttgtgtccgctggccgagcagattttgcttcccgggtcagggctctaccattcttttttcttcttttcttccaagtgtgaaaattgcagcaggatgtactgttgtctgtttctcttacaccggtctggttgttgattctgtgaaattttgttgtgtgattaccgagactctgatcattttacagttgtgcctgctctcctctgtgtggcacaaatgcggttggacttgcaacagacgtttctttgttacgttgttgggtttttttaacgaagagctccggaagttcattccagagcttcttttggcgaacacggcatcacccttgaacttctgactgtacctgtgacaatgcttaacca

SEQ ID NO: 7540 - DNA, 837 bp, Zea mays
tcgacctgcaggcagcctctctgacgttcggtgtcattctcgttatctcactggtgatgggaattgttctcaatttcactatgttttggtgcacaattgtgaactctgctctgactacaacaatagtaggagttctcaagggtgtcggatcaacggtaagtttgctgacttatgaaagatcagtttgtcctttaatcagaaccctttgatacaattgagctctgaagttaactaataagtaaatcatatatcatgtttttcgccatcagaccctcggtttcgttctgttgggaggtgtcgaagtacatgctctgaatgttactggactggtgatcaacacatttggcggcgtatggtactcttatgcgaagtataagcagaaaaggaaaacaccacggaagatccaacatgatgtagagtcgcatgcccacaagtagcgtcagattaactgtagttatacttcgttctttgatcagataataactggatgcatgtttaaatccattttttctgaactctattccatcaccagcagttaggttggtgcaattaagggaagcaacaagcttttcctatttcacatcttatagtttttacgatcagtgatatagggtgtaaagtcagttatttttcgcagctccagtgtgcgatgcatcacatttgctccaaagagagaaatccatgggtctggatgaggtgattgcccggttctttaaggaatttttaaacatatgctcctagttcagctgttcagttttaccccagtagttaatggatgggatgaaaagttttaactaagtgttttgagaaagggatctcttggattcctttcttttc

SEQ ID NO: 7541 - DNA, 779 bp, Zea mays
aaaaatataaatctgggaaaaggactactgatataacgctagtgatactaaacttagacaagcgggaggcagtaactattgacataatctcaaaccaggagttcactgaagtatttttcttctcagtttgaacttagtagttttactagtattacacagtttactaaaatctaatacttataaggttgtctttcacttcgaatactgttgactttaactgctgttggaagatccttgaccttgttacttgacttcatggatacaaacatgcacttcatcagtaaatttgctactctattttgttcaaatttcatgcctttttttcctgatttgcaatggtttttttcttttctaggaggagtgcaaacgcttgcgtcagagcataaagtatggattcattccaaggctgacagtggtaaagttctcattaacttattactagtgtttcttgcacattttttgtgtcatttatgcactgttttcttctgtttaactatcttatcttccagggagaggttcaggagaaggcaaaggttctccaaactctgaaagtcaatgatgtaggcagctcatactactgaactattaaagtttttttcttggctaggtaactctattttgctgactttactgccaattgcaaacttttcagtggattgaaagcgaaaagatgcgacttgggcatcttcgtgaccgtgcaagtgatatgggacgtataaaagaatatcctttttcatgcattattgttatcatttataaaagcaccattatacattggc

SEQ ID NO: 7542 - DNA, 729 bp, Zea mays
cctctagagtctacctgcagaaaaatataaatatgggaaaaggactactgatataactctagagatactaaacttagacaagcgggaggcagtaactattgacataatctcaaaccaagagttcactgaggtattttttcttctcagtttgaacttagtagttttactagtattacgcagtttactaaaatctagtataaggccgtcttccactttggatactgttaatgttaactgctgttggaagatccctgaccttgctacttgacttcaagggtacaaacatgcacttgatcaataaatttgctactctattttgctcaaatttcatgcctttttttcctgattctcaatagtttttttcttttctaggaggaatgcaaacgcttgcgtcaaagcataaagtatggattcattccaaggctgactgtggtaaagttatcattaattatttatgagtgtttcttgcacatttttgtgttatttctgactgttttcttttgtctaactatcttatcttccagggagaggttcaggagaaggcaagggttctccaaactctgaaagtcaatgacgtaagcagctcatacgaatgaactctaaacgtttttttttggctaagtaattctgttttactgacttcactgcaaactacaaacttttcagtggattgaaagcgaaaagatgcgacttgggcatcttcgtgaccgcgcaagtgatatgggctat

SEQ ID NO: 7543 - DNA, 769 bp, Zea mays
atttttactgttccgttggaacgtaagattttttatgaattacacagaaatcggtttatttttataggaaaagtaaaaaaaaacatgagaaatccaacgcattacaaagtgggccttattgtttttagacgtactcaaacgagccacaaataaaaagacccgtaatcaatagcacgcctttctcgaagccaacgagcgaaaaaaggtcagcgcgtgaggctgcccgcagtggtaggggtgggcattttaaaaccgaaaaccgaatccgaacccgaaccgaacccgaacagaccgaattattggtctattcgggttttcgggttcgggttcgattcctatatgtgctatatttcgggttatgggttcgggttcggttcctaacctataaaacccgaatagacttaataacctgaaatataaaaaagctcttaatatgtgatggtattattatatgatttatgaacttattagctagaaataatgatatcatctaaacgatagtatacatatctttgtatactaatttttatagtcacttgttgtagtaatagtactttcaattaattattcattgtctatattttaacaaaatatactagtctctctataattcgggtctattcggtggaccgaatagaccgaaccgaaattgtgagtctattagggttcggttcctaaaatatttttggaaatttcggttctcatttttcagaacccgaaatttcacaaacccgaatagaccgaaccgaattaccctaatagaccgaat

SEQ ID NO: 7544 - DNA, 789 bp, Zea mays
gatcgatcaaccaatcgctggagttcgttcatcttttccctatgaggattgtatgcggcatgcgacggatcgggatcgggtccaagaaaccggcacggagagatgtggcggcggcggtcgatcaggagctagcacctcctctcctcgcgctgcgacgggctgcgccagaagccggcgccctggaagctggcccagaccttcgcctccgcctcggcgagctcgtcgcgcccggcctccgcccgcgcgggccagtggcagaagtcgagggcgtcgccgttgcggtcccgggccgccgccgcggtcggggaggcggacgcggcagcgcccgaggcgccgaggagctccgcctcctccttcttcttcttggccgcgcgcctgcggcgcgcgcgggcgcgcagcgcgcggcggcacagcgcggcgggcacgcgcacggccgccagcaccaccagctccaccaccgcgcaggggaagcagcagcacaccgcggcgcactccgccgccgtcccgcccgccacctccccgcaccgcggctgctcgcgcgcccgacgccgctcgcgctcccgccgcgcctccacgggcggggaccgccgcagccgccgctccgactcctgcgccgccgccgccgccgcctgggacggagacgctgacgccgacgcagacgccgaccctgatgcccactgcctcgtgggacgagggtcacgggaccgccggaaagccggacccgcccggtgggctgggcgcccgctgtgcttgctttcttgcttgggtggccttcctggggcgccccgg

SEQ ID NO: 7545 - DNA, 738 bp, Zea mays
atcttgcatgcctgcaggagggccgaacattagctatgttctgtacctgtgtatggctcagattgctacaatgtttacaagaatggtcgctggaaaggagaagcatacgcattcccagaagccagaaggtcctgtgatcctgttctatatctgctccgattctgagtggcagaaatgcagatcctacgctggtattagatgaagcaaatttataggaagtagtattctcaacaaatcctctggggcctgtctgaagtggtggctggctaggactgggaggcaactttgccttgctttgcttcaggggctggctgctctgatgattctcctctctgattgggatggtgcgcctgtacgcaaccgttcagggcccacgatactagatgtagctgctaaaatgtgcgtttttgccaacgatcataactaggggggggctgggcctgattctacgatcctagtcgatagattctacaacacagggatcttacgttaccaccagcacacttacatcatccctgaacggatccatggcttgggaccagcagatcaaaccatccatggcttgggatcttacagctgttcgtctgtctgactttaatccgaaacagtttctattgttcaaaaatatttgcatttcggatgccaacatacccatttgcatggcaaacatacccatttgcagcctctcatattcactaccctgaggcccacaaaaacatatcaaaatttacaaagtaa

SEQ ID NO: 7546 - DNA, 846 bp, Zea mays
gagtccacaccaggatcctccacatctgtgcccgtgcccctactatcggcaacaattgctctgttgagttcgaccctgctggttgttccgtgaaggatctgcaaactcagaacgtgatcgtcaggtgcaatagctccaaggctctgtaccccttgcacctctctctagctcagtccttggtcgccaagtccacctcacccttgtggcatcgccctctcggtcatcctggtcatgaagctctatcgaagctcccgtctagcatcccccttcacttggaggattcctcatatttatgccatgcttgtcagttagggcaccatgttcgcttaccctttcatgtgtctacctctcgtgcgtctaataagtttgatcttgtacattgtgacctatggacatctccaatcgttagtgtatctggttataaatattatttggtcattcttgatgatttcacacattatttgtggacttttcctcttcgtgttaaatctgacactttctgcactctcgcgaccttcattgcctacgcctctacacagttcgacgcctctgtgaagcccatccagtgcaacaacagcgacgagtttgataaatccagcacgcgtacctttctccttagagtgtagccaaagttactgtcaggcgccaggaaaccctttcttctgaggatgttctttgagttaattctatctctgaagaccagccacacaaagatcttcaatttcttaccaaccttggactgccaaatccaattataggcagcaggggggctaaaattgactgaaaagtaagattattagacttggatgagcttaaaatagagttgttttggtcaagtggaatgaa

SEQ ID NO: 7547 - DNA, 815 bp, Zea mays
tccgcgtggaatggtgtcctcgtcaaactgatgttagtgccagccccctgtgctgcttgaatcggtcagtcaatgtctggaaatcatcaccaacgatgaggggcactgcatgcatcctctcagctattgcttcctgaaattacatgctcctgttagggtgtggcaaaaccagaacgagaacatcctacgttcattattctcgccttcatcaagacatccaatgtaagaagggaaaatgcagaaatgtaccggatgggccagggacccctttttggctgcttggtccctgttgagagatcttcaaggaccgtagcttggcggcggaagacctgatcgtgttgatcaagggctgatctgcatcgccgttgctgtcgtcatcttcaccgtgatcctgatggtcagatgcaccaatagattcctcaccactagagttgtgcccatcatctctaaaaagtttcttcccacgtacatgccgagcaccgcgtagatctggtacatctggtacctctctaacttttcttggacggccccgtttcctcacaggtttttcctcttcctctggatatggatcaagaaaatcagagtatcagacacaactctagacagaaagacgagcacagttcacaaagagtagtttaacaacacaccatgcaaaacctcattctttgcatgtttgtcacgtaagtgctctacgaacataaaaaatgggcgccaaacactttgatctccagtcgtattgatatgttgaatcctcttctctacatctgccaagcttcaagaaaagggatagcctaaaattataaattagaaaccag

SEQ ID NO: 7548 - DNA, 608 bp, Zea mays
ttgcatgcctgcagctatattgtgtaagccataccttccagaatattggaaacacaaaaaatcttgcaaattatggaaggctatatctcgatgcttgctaaatacctacaattggttgagaaatataatatgtaaataaaggaatatggtcctccatcacaagggacaaactagcataggatctttgtcataccacatccattacttgtttgaaaaccaattctggaaggtatgtcaaggtagtaccactgtcgattatggtgccttttttctctcctgtttcaaaaacatgagccgggagctgtaatgtagtgccaccaacatcaattgacttaaggttcacattgtagtgcggcctggaaagtaaaatcatgacaagctatgagtacagtataaatgaagtaaaatgactagctgcaatgcatcgcatctcaagttgaactaaactctgcgccaataaaatatgcattcatataaactttgtaacagtgctattgataagaggttttaccaacccaaaacttaccaaaaacaggggtatgttcaagaggccatgggcaaaaaagaacacaaagtagcactagcacaacagaacatttatccaatga

SEQ ID NO: 7549 - DNA, 745 bp, Zea mays
gctccaccgcaccatcactcactcatcagtactgctacgagtgctactcaccttgcctttgctggaaataggaagctcgcctctaatccgagagcggagcgcctcctcttgctgcctaatccctttcctctctcggcgtcttgggggccggggcctaagcacgcggcgagggctctctttcttcctcacctcacctcacctcaccctcgcccgctacacaagtagtatctgctggaggacggtgctgaggttagtttacgatcgagcataagtcgtggtagagaacgcaagcaagcaagcaagctgctttttggggggtgatgaggagatgagaggtgggaggctaccgctatataaagagggcggaggaggaagagagagagctagggggcggatcgagtgggttcaggggaggaattcgagggcgcctgcaaacgccgccatggaggcggccccgaccttaatttctatttattgctctcgctccgatcccacagagctcacctctctagcttatctccactccacccaaccagatgagatgagagagagaggatggacgcaggagagagagaaaggagacgaggaggagaaaaagggaagaaatggagaaagtgagcatggcagtggtagtagtagtagagtagcgtgtgtattttcttttttttatttcttttctttttgcagagagttgtttccctttggcctttgccctggctcccttttacagtttgtacccttgggc

SEQ ID NO: 7550 - DNA, 768 bp, Zea mays
tgaccttatgcagaatgatgtaccacacttgctgagagaagacgcatgagattagcagatggtaaatcgtttcctcagcttgatcacaaagcaggcagcattcagggtggggcagacctcttttagcaacacggtctgctgcccagcaccaattgtgtgccactaaccacatgaggaactttcatttgtatggtgctcagctcttccaaattctctcccaaggcccaaactgtacagacccaataaaaaatccctcatgtgcagatttagcagagtacagtcctgaactagagaattgccagatatgagtattatctactgtaagttgcaaagtcaaatccaagagactgtcctacaacttcaaataatctatcaacatagataagggtggatatcgagccagctcggctcagtccagctcgagttggctcgttaagataaggagcaaggtcggttcgactctgccagctcgagctggagggctggctcagctcggatcgtctgccagctcgagctggctcatttagctcacgagctaaaagctaactcacccaagaacatggaggggatacggggattcaagtgcagcaaatgagtagaagatggaaaataagtaatcacccaaaaataaccacctttgcaagatcaaatcgcaattgtttggtagtctataatcccaaaaggaataggcccggtgcagtgatgagaaacctttccactgagccaaaaggtcctaagttcgacgcagcctccctgcaaaatgcaagg

SEQ ID NO: 7551 - DNA, 769 bp, Zea mays
tgcactccgccttccgctttcccccacatccggcttgactgctttcgcgccggtggccggccggcgccgggctgccctgcactcgcccgcccgtcagaacagcatccagtccaggcggttggtcggcggcgcgccggaggacgccgtggagctcacggttgtcgtcgacgaggccgaggacgtggacggcagcgacgacagcaggtccagcatctcccaccgcgcctgcctcgcttgctgctgctgctgctgcggcggcggcggtgctggcttggcgccggacttgcggacggtggcggcgttcctggccgccaccgcgtccagcgtctccacgtacttctggacgcgcttcacctgcgacgagcggcggaatcgattcaaattcagtcggccgcggcgttggaattcaacggggaagaaggcgagatatcggatcgacggatccttgctcctcacctgcatccgcctctgcgccttgacgtcgccgtcggcgaccacggcgtcgagcctgagcagctcgttcatgagaagctctgtcacctgcaccacgttcttctccgcgaccttctcccccttgcgcaccgacgcgtacagcgccgacacctgccagcaagccttcagtcagattttgttcagaggttggtcaactcccctccctgttccggtcggtctgcatctgctgactgactgctatagatgggctcggaaaagatgcaatcttgggatggatgggtactgggccatgcccaagtagtaacaacgaacccac

SEQ ID NO: 7552 - DNA, 847 bp, Zea mays
aactactaactatgcatgctgccacttaaaatcatattgaacccttgcttttctgagcagctgtctagttgtgtgatggcaggatatcttactttcttgttgggtgattaagctcccagctaatgaacagcattgcgaagtacatagcccccatcgcaaacacaatgtggaaaatctcgtagctgtaggggatgtcctcatccaattgtactttatcattccgaaactgagaatgaatagtttttgttaatatgctgggtaaaagtagcactctgaagaaattcttcaagtcaataatgattaacaagatatatatacatattacttaagtaaaaagagagtacataggagaatcttttttcttgaacatgtaggagaattgtgtatcattataataaagacacgtgagaactgtgatttgacccaaaaaacatgtgcattaacattttcacactttcaagtaacttgacgtcttgaccaatgagcaatgacatccctgaagtctgttttattttacaatcttacataatagctgtgcaactaccgagcaatgattgttacttagaaactggaacacatgatcatactgatgccagggaaaaaataaaaattatgcatgtcatagatcaaaattgagagaagacaagcctggtgcagtgtgagagctgtctcactaagtcactatgtcaaaggttcgaagcagtctctccacatttgcgggagaaggtttgtatcggtttatttcttatctagacctcactcatgtgagacgtcttcgacactctgcgtcccccctttatagataaaaattgagagtaataaaacttaccctggaaaggatttggtg

SEQ ID NO: 7553 - DNA, 820 bp, Zea mays
gcatgcctgcagtcccctccgcgagtgcgcctaactgcctaagcacaacatcctagcgctgcttgactggtgcgacgtgccgacgtctctgggagccgtggctctgttgtctgattgagcttttagttgggcgtcgcctgcacattgtgtagctaggctgtgttgtctgatgaagctatctatcccgggaaggcaaaacgggggtgaatgaataaaaaaaaagggtcaacctaggcatcctgctttggctcctcaccggctaatcttctccgctgctggtgctcagcgaccttgtagtccacgacctcacggaacaggccaggggtgagctcgcagtccttgctcccgtagacagccgcctggacgctggccatcatcttggctatctctcgtccggagaagccctgggtcttggccgccgcctcgcggatcaggtcgtcggtgacgcccttcaccacgatcttctggggctggcggcggaagaaacggagccagctcttctcgcgcttgtcgccggctctgatgacgtacttgtccaggtatagcttcaggagcttgaaccgctcgtcttccccgggcagggggaattccaggacctcgtcgatacggtcggcgacggccgagtcgagatcaccgggtctgttggtggcaagcgcaaggacaatgtccttggactggtcgcctgtgcggaagaggagagcattcagggcactcctttgagcttcactcatgtaagttttgtttcgtctgtagggtaccccaaaaaaaaaacaaaaacggtctgagatgtaaacgctacagtttgcaagttatgggtgaa

SEQ ID NO: 7554 - DNA, 748 bp, Zea mays
aactggtcggcgaagttgggccacgtcagcaccggcacgccgtgggtgatggcctccagcgaggcgttccacccgcagtgcgacaagaagccgcccaccgcggggtgcgagaggatggtcacctgcggcgcccacccgcggacgaggaggcccctgtcccggacgcgctcctcgaaccgctcggccagcagccacgcccgcacgtcggcgctggacttggcctccttgatggcccagacgaacggccgcccggacgcctcgaggccccgggcgagctcgacggtctgcttcagcgacagctgcgcgaggctgccgaagctgacgtacagcacggacgccgcgggccgggcgtcgagccacgacaggacgaggccgacgtcgacgtcggcgcggttgccgcgggcggccgtcgcgcccgcgtccaggccaccggaggaggaggcgcacgtcgggccgacggcccaacacgtcgtcgtcgtcttccttccgagcgccgccgcgtagccgtcgacgaagacgccctcgaggccgcggaacgtgttgatgagcaggccgtcggcggtggcctcggcctccgccacgtcgcgctcgtagctttccatccccggccactggaagaagccgcggaacgtggccacgttcccggccgcgcgcaccgggaagcccggcacctcgaacggctccagctcgtgggccacgcggcccgtacacgcccgtgcgtggacaggcaatgcgtggcgaggaggaa

SEQ ID NO: 7555 - DNA, 889 bp, Zea mays
ccatttttttaaatcgattacttcagctacacattttaggtgaccaatgttttctagtgatattgtgatgatatatcgataagacaattagtcagatgttgatgtagtttctagagtcagctgttcaacttgacaaagctttactgctgatccttttagtaatctattagctggattaatcagtaatcaaacctttttgagctgatctttactgaaatcaggaagaatagtgctttgcataaatgggttgtgctttattgccctggacatatttacacatcaaatttgtggtgaaagaccccaagtatttaaattcaattaattatgattaattggcactgttattggaaattgatgtttggattttaggtcatgaattatactttcatgtgttgtgatttgacttgagggttatctaatctcttgcttttctaatgctacacctatttgattagagaaacggacagtgggcataatgccatcatcgtttgctaagagcctaagaatgaggcagatgtcctacccttcttgaatctaatttcatggggggcgtcccaaattatcttgtatttgtgtaaccagtacgatctgcctgccatgttttatgatcgtcaatcttttattaaccattatgcacaacctttttgtggtttaactggcttgtattaacgcacactgcgtatattgtctgttatacattgatcctctccttgtctagcttgacatcttataactctccatgtgactgacagtctcacgtcctctatttatatagtatattcatgcctactatagcttatcggtatgtgctctgattcactcctctgacgtcatcatcgactcacaattagatcgcactccgcagttatatctatcctcatcttcaaca

SEQ ID NO: 7556 - DNA, 730 bp, Zea mays
ccgccgatcctctagtatcgacctgcagctcttggaagcattcgagctctgttgcggcagtgtccatctgcttgaatgtatcttggacctgtgaccacagttttccagcccgtatctaataaaaagcaaacagaaggttagtgaaacataagcactctgataacatgctattgaattgtcaacaattttgtttcaatgaataagggagcaaattcggtcaggaaaacagcaagagctaacaatactagtttgcagcagccagtggcagacctaggattttacaggagggcatgccatgcattttgataaacttgtttagcgattcagtttcaaggctctcttgggaatgatcttgatcaggttgaaagcatgctctgcaattggttatccaaaaagccagtgagaaagtttcattaccaactgtggtttgtacagcaacaccaacaacgtttgggcaatataagggccttgcactggtaaacctgcccaaacatgttcctcatcaatcttccgtgcccacagccatctgatacggagtgaccagccgaaagtttcaaggttatgaatgcctagctccccaaactgaatagggaattgaaccttttcgcacgagactagacagttaccccaaagaaacctgtcttttcttatcaataacttgtaacactcattttgataaatccatggcaaccacaagataaaacaggatagcatggagcaccgcccttag

SEQ ID NO: 7557 - DNA, 791 bp, Zea mays
gctctggactataaggaggcgttcaccatgctggagaaatgtgatggtaactacagccaagcaccttcggcagtggactgggagaaagtcgaggttgcttgcaggtatctgaagctgttgtatgactctgcaaacaacattatggcagtggaaaatccaactgccaacatatttttccatgatgcctggacaattcagagagagatttcaaatgccacagatcatcaagatcctaattctgtttccagcagcatcgcaaaaggcgtgcatgagacgtttggcaagtactggaaagattgcaatgttgtgctagccattgctgttgtgatggatccccgtttcaagatgaagattgttgagttcagttactccaaaatctacggtccgacgaagggcgctaagtatgtcaagttggtggatggtgttgtacatgagctttacaaagagtatgttacactgacacttccgttgatgccaaaccatgttggggataagaacattccaagagatcctacttccattggcaatctacaatcaggcttcgaggtctccattgtcaagtcggagctagatcagtacttggaagaagccctggttccacgcatcttggagtttgacattctgaactggtggaagcttaatgccgtcaggtacccaacactctcgaggatggcccgagatgttcttgctataccggtgtccaccgttggtcgcggcagctctgtgttcgcagctgggactgaagccaagatgcttgacgactaccagagctcactgcaccctgaaacctt

SEQ ID NO: 7558 - DNA, 841 bp, Zea mays
cttgcatgcctgcagctgcttaaactcaccgaaacaaatatatcggtcccagctggtatttcatatccctcttttgctccattgcacccgcctgggtaaatagacgatcacggcggcagagttagaaggcatgtaccagcgaaggcaacgcaccctgcttgtcactaaactaattcattgaaaaatagttgtgtgtgctgatcgaaggatacaatttgccaacatccatccacaagtatagaaaggctgtcatgtcatcaccaaggtctcgataaacatattaccagtaacaagaacagcgacttcaaccaaactagtctaaatggccactcaaatgaccactacacaccatttgtattgctcaggaaagaacttacgacattacagagaagaagatggtacctggcaacttgtctggccggagagaacgcctgattaacaatggtggctgaggatacaagcgaagagcttcaagaataatcagttttatgtacctagagggcaacacaaaggtttcatgagagatgcaaattcatttcaaatgtatagatatagctagtaatttcagagaagtcggataccatggatatgctactgttaataatctgataatattttttatgaaacaataatccttattgataatatttttatgaaacaataatccttattgttaagcaccatacacctatccctcaataaatggaaaataaaagaatcaattctagatgaataaaaaataatggtacaggtgacatactccagtttcttaagaagattcgacagtaaattgcccccattgctgagaacagaatcaacctctgcctgggcttttctcatc

SEQ ID NO: 7559 - DNA, 805 bp, Zea mays
tgcatgcctgcagcttgagctcccactgccccttgggcggcgacggcgaggcgcgcagctgctgctgctgctgagcgaggagcttcttcttgaggtgcgtgttccagtagttcttgacgtcgttgtcggtgcggtcggggaggtaggaggcgatggcggcccagcggttgccgaggagcgcctggaggtggacgatgagcctgtcctcctggtcggagaagccgccgcggcggatgcccgggcggaggtagttggtccaccggaggcggcagctcttgctgcaccgcagcagccctgcatgcatgcagcagagtgagaaatactagcactagtggctgcggcctgcgagcgcacaaacggccagcgtgtagccacctgtgttggcggggactgcgcgccagttgccggggccgtgctcctggacgtaagagacgaggaccaggtcctcctcgggcgtccacggccccttcttcacgctctccttgtcgcagcacggcggccgccccatggatgggtcggaatcgccgccgcgcggtctgtcgtcgacgatgccgccggccaacagcttcgcccggtggatggtgtatgaaaagaaatcaagacaaggttcaggttccagaggcgtgtgtgtgtgtatatatacctgtgcacactgcactcactctgcacgcagagtagacgtacggcagagaggcagcacagtctagtacccgtaacatacttgagacactgttgtcatcaatcacaaaaagaagatttaaagcattcacgctattagtggggtttagtgactaatgacaacaca

SEQ ID NO: 7560 - DNA, 1041 bp, Zea mays
tgggagatgaggttcctgtccaagatcatcgagctgaggaagacagaggcgaactggctaaagagatacctctacacgtcggccaccatgaccttcatcttctggggcaccccaaccttcgtcgccgtggtgaccttcggagcctgcatgctcatggggatccccttggagacggggaagatgctgtcagcactggccacgttccgcgtgctggaggaacccatatacgaacttccgggcactatcgcgatggtgatcaagaccaaggtgtctcttgacaggatagcatcgttcctgtgcctcgacgagctacccagtgacgccgtgcagaggcttccacgtggcagctctgccgacttcgcagtcagcgtcagcaacgggtgcttctcatgggaagcctcgcctgatgctccaacactgaaggacctcaacttccaagctaggccaggcatgcgagtcgcggtctgtgggacagttggctccggcaagtccagcctgctatcctgcattctcggtgagattccgaagttgtcgggagaggtccggacctgtgggacgacagcgtacgtcagccagtcggcgtggatacagagcggcaaaattcaggagaacatactgttcggtatggagatggacagagacaagtacgacagggtgctcgagtcgtgcgcgctcaagaaagacttggagaacctgccgtttggcgaccagacagtcatcggcgagcgaggcatcaacctcagtggcggccagaagcagaggatccagatagcacgcgctctgtatcaggacgccgacgtctatctgttcgacgatccgttcagcgcagtcgatgcgcatacaggatcccacattttcaaggtactaagtacatgatttattgatttattccaagtatgcttatgttcgacctttattattattttattttgaaggaatgcttgcttgggggatttggcttcaaaaaacagtgggtttatgttacctcatcaaaattgaatttcctacctggccgcgatcttattctttggaagaatttct

SEQ ID NO: 7561 - DNA, 840 bp, Zea mays
tcgacctgcagccaacacgccgacgggctcagccaagtcccccgcgggacgcgtcaccgccgccggaggcctcgtcgccctcgccgcgctacccgtcgccgtcgcggccgccgggatcatgttctagagcatctaccggtcgtcttagactttgtgatttcttcgtcatcattcttcttacagcacacacatgtttgtgcattatggtactagttcgttaattcacgtacaaacagctagctgttccaggcacgagattcttccggatttgtttcctagcttgtaataattccccttgatgagcgtgtgtttggtatgtttctactacggagcactgtatgcatgcagttcaatctcgatctcgatggctggcttattcctcctctgccccgggccacaattcaaggagtcacgatccacgcacggacgcgacaaggtagcaaatgctgcccagcggcgcgcggtaccggtggctgcgatgaattggctgtttggcacgggtggtgagagggaaacatgggtggtgatgagctgttgtgggccgagccggtgaatcgtccgtccatcttgagcgctggccgttggaacatcaatgaggagggaacgtacggcatctgcgagtccggctgcaatactagcctctcctcctcgcgtgcaacatgattctcatctctagtaaaaaggaaaaaaatatcactagagagatttggaactcacattcaaacagaccctaataatgcagcaataggtataacattaccttttacccttgcccgtgggtaagagctctttagcatcaattcttatgtcagcatttgatgagcgcctgtttgtcttctt

SEQ ID NO: 7562 - DNA, 802 bp, Zea mays
agagattccctccggcatggcatgtctgtcctaataactttgtggagtcctcgaccacgctgccatgacgactgtgcggggagatttgtggggggaatccttgctctcccggaacacatacgagagttgttgatacggtgaaccgttggactccattcggagactgacaacacacggaagtcccgacatattattgtcttgtttaattaaaagttcgcaagggtctccaaaaattatgtacatctttaaataactatctatttttgtaagatctagcgccatagcccttgctgttttattatttttaatactatatttgagtttttttttaaaagtagtatgaccctaaaatagtttccaaatatctgagagaaacgcatctaaaatccaagtttggaaaattattatatacgatcaagtgaaatccgaaggttcaatgacaaagcaactactcaacattagaaagaagaagataattcttccgttctttatttaaaaatgaactatctgggtcaactatccccccctcccccacgggccacggtggaggcccggaggaacggcatcatgggccgaccggcccaacgggtctttatcctctccgctcctttcgacattagaaatccgtaacaattgttacaagtctgaatttactaaccgtgacaaactatagcatggtttcttctttcttgcctaccacagaaagagaagactggtgatctgaggaggccacgaaactaaccgaatgtttcgatgaaaaacattttcatgatttgctgaatactgtatgcgtttcttaagt

SEQ ID NO: 7563 - DNA, 820 bp, Zea mays
gttgaggtgtcaagcaatgagtatgaaccttcagagaaagatgtaatcttcgctgaaggagtaacacaaggaaatgggctagctttcatcgagttcacacttgatgatcgcagcccaatgtctgaaccttatatcgacaacagtgaggcacattcgcagcctctcaccaagtaataatttcttaacttgccttgtgaacgtgtgtaaaaaaaatgcatctgaatcatgtgctcttttttattcatcagatatcagctgatcagagtcagtgcaaaaggcatgaatgatggctgcaaatgggtggaaatgtttgaagatgtccgcatggtaatattctgtgtagcactcagtgactatgaccaattgggaccccctgtaagtggcagcagtcggcctcttgtgaacaaaatgatgcaaagcaaagagttgtttgaggctacaatccggtatttatttatttatttattttcattctcagtttatgttcaataataacatataacaacggtccagtgattctctcgagtttgtgttttgagcaggcagccatgcttctgcgatactccatttgttctggttctgaacaagtacgaccttttcgaggagaagatcaaccgcgcgcccctctctagctgcgagtggttcaacgacttctgccccgtgcggacgcaccacaacaaccagtcgctggctcatcaggcatactactacgtggccatgaagttcaaggacctgtactctgcgcagacgaaccggaagcttttcgtgtggcaggcccgtgcccgtgagcgccagactggggacgaagcattcaagtcca

SEQ ID NO: 7564 - DNA, 764 bp, Zea mays
acaagtctgttgccggatggaatgtcatcggcttcatattcccgttcctcgtggcggagtccaaggggtagaggagatctccggcgagatcgaggacagcagcacctgccagcgcaaccagcggagtgtgccgacagatttgaatgaataaacaagggtcctacttgtacttccgtaaagctgtgtatcaggaccactattattatatttatggaacaagaaacgagcacatttctgggtacaaaatgatgcaccttatgcttacagtgcacagtagacaatggtttcctcctgctacgaaacgatttacactaccaaggaacccaagaccaaaggggtaaaatacagaatcaaggtgaagggactacaacttgctagcctcacccccaaatcaagcaataaaaaaacacagatgattagcgattaatgatgatagcaggtattgctgattgcccaagtaaatcgaatgtcattcaataaattataaatcccaaatctaggtttaaacaaaacaaggatgaaactccggggtctacagccattggcttcaggtaagtgccatgtaccacctatagtataaattcccacatgtgtgttgataatgggaaggtgtaacatgcttgtaaccagttgctagtctttgggtgcatggtgtggttagatgacaaccacttgcccttagtgcccgctaccggattttccctagggagggaaaatgcagccatgtcttaggcgttcagtgctgtttttttgcagattgggca

SEQ ID NO: 7565 - DNA, 866 bp, Zea mays
attaggaatctatgttctatccagatgcttataagttcaatctaatccttttctctgtagtgtactaattttccataccgtgcactatttatagcacttcttttgaacaaacgcttgccatatatgtagcctttttcattaaagtatacatatatgacttgaaccatcaaccatgcctgcaatctcagacaattcaaagtatttactggattatattgctttctccttttttcatgaatacgttggagtgctgcatatcatttcattaaagaagaaaaatgaaccaagtgcaacaacaactccaccccacaacatggttcttaaaggggtaaggcgagacaaggcgttggacctccgcttgaacgcctaggcggcacctggacgcctaggcgacgcctttaaaacaccagttaagaagatgtgtgccactgtcaaaataacaaatgacccgacgtaaataaccgttgaacctaaacaacccaagattaaatctagcagccactttgcgccagaagcacatcacaaaacactttatttcacaacagccttcacagcccaatttacataaggaaagatagagttgacccaattgttgtgttgcttccaaagcttccaagcaacaaggatggccaaagaattaaggccttccctaagttgcttttccatttgtttgagtaagcgactccaccatcacgagatgacactcaattcgctgaaggacattgaatattgctttaccctaccatttatcatcaacacatgaattagcatctaaatgaattcataattagactatatccatttttccatttcgaagcgagtctgttttcattctcactttctttcctgacaggctattatattca

SEQ ID NO: 7566 - DNA, 818 bp, Zea mays
atcttgcatgcctgcagaggggagcagctacgcaggaaatagagggaaggaagggcagcggccgggaaccagcaggggcactgcgaccgcttgcgcttgggggctgggcgcctaccgcctagctggctggaggctgggagcagaggagcgctgaacaccacaggggccgccaaaactgagcagggagagggcgagcaccagggaagcggcatcggcgaggctggggacgagcaggggcggtggccatcaccagcgctgaaggacagacgacggcgaggtcgagcagggaggacgcgactccatggccgggatccacggcccgagcgacgcatcaagggaggagcagggaagggaaccggagctgacagtaatttcatatattccttgtagtgttatttttataataaaataatatatgcttggttacttaagaagtggcgtcttaaatggacagccgatagctcgaaacttgtagactagcagaatatgcgctggagatgcttccttgtttcgtatagacgactggatattctttattatactcactgctggcatttcgtagtgttcttatagtcctagctttaacttttcatcactggttcagaattaccatgaagttataatgaattactaactaacactgttgattttatagaaccttcagggagcacagaatcgccaaggacagcaacctcctggaattctcaagaaacctactgagggtgattcaaacccatcaaaacaagggaaccttatggaaacctttctggaaaaagggagggaacctctaatggaacctcttcttggaaagaagaact

SEQ ID NO: 7567 - DNA, 863 bp, Zea mays
  unsure (1)..(863): unsure at all n locations
aggttcgcctacgactacgagggcaatgttcgcccgctacaacgtcgcgcgcccgcctctgcgcgcggggacttgtcttcagcttgaacgtcttcgccaccgcgcggggacatcgctcagaaaatacgtgcctttgccagcccgtcgtgcaagcaattcacgccagctgacaggcgcgccagcatcatagagcaatgaactaatgatggccaaatttacaacatagcatttatttcgatggcgccaaaaaatgcggattggatttttacacaattgctagcaaagaacaaatcaacatatctcggacgaaatcacgaaacaaacaaaaaaacacgggcacacgcacaaataaggaatcctctgatcctaaagttgggtatgtacaactaaagttgcagattagagtagtaaccaagctgagttgcgtgtgatgaccctacacgcaatcgtctgatcctccacgccaccactttttttgtgtgtgtttctcatctttctgctcgtttattattttttattatttattgcgatatgagattcggatcattcctggtggatatgaatactgggacaaccctgagcgatgaatcaacggccctgcaatcctcgctccaattgatccatgctttgtccctgcaatccttagatccaatcgatcgatctatggagtgccgctccagctttccgattgcaatcgatctatgggcatgctgacacgatcctccagtgtgacgctgggtggctcctccagtataccacccattgacaatgatccaaaccactacttgctagtatagctttatccttgtggtgatgggagtgcgacagattgngcacgactncaggatctgtccgcagtcaca

SEQ ID NO: 7568 - DNA, 781 bp, Zea mays
ttaccatgctgataataacttatacaatgtgcattaaccacctatcatcttatttgccaattactgcacaatgctgataaatttcaattactatacttctagaaaataaacaaggtccaacgttgtttgctttccatttcccttctactctgatattatgtgatttggtttattcatattactgtccatagcatatttgttgtgcacacagttataaatttgttttctcgacactgcacaggcaagggggaaatctttttatagatctgttccgtcactgtgacaatcatttgggagagaaacaagtaaacaacccttttttccatgtatgatcccattatttgtctagcagaattacatgaacatgatgcctcacaatgtagttttgaacttcactgcatttttcttgcagaaaactccatctggaagtgcacgacaaccactacagttgactaacgatgtaaccaagatgatgcaaaagcatcagctggaaatgccacagttgctgctactgagtaccatccttatatccttatttcctaattgttgtggtgcatgtacaagtttttttaaaaaaaacaaatttcgaattggttattgctgttagaactcatctgaatgctaccttctcatatgctcctttttctctctggctgttatgttaaaggaccagatacaagtcaatcttcccttcaaattacaatttaattattttatatctggattctgcaagacactttcaaaaaaaatataacagcatgtgggccctatgttatctact

SEQ ID NO: 7569 - DNA, 946 bp, Zea mays
ctctcggcgtccctacaagcgagcgattcattaattactagtctagtactgtcattgcaattgaatggttagtttttctctctctttctccggcacaaaggagtggctggccgtcgtttcctcgtgcggcactgattgcatgcctacgcggtacggtacgtctcgtcgctcgctccctacgaaaatccatcactcctattcctatagcattgatgacggcgatcttgacacctctagggctggaaggactctagcctatcattccattccatcccattccattccatcagacagcatccgagattccagctgcatactatactacgtggccgaaatatctgcggccgcgctggatggcatgggactgactcaccgctccgtgctgtgtgcgcgccagagccaccccactgcgtggagttcagtcagtgcagtgcagtgcagtgcaacgctccccgcgcaagcgcccggccggtgcctgatgcactgcacttgagtgacagcgcacacgcaccgagtgacggacgcacaacattacaacaacaacaaaaaagcggctgggtttgggcgtttggcgcacgtgctcgtgcgtcgcggggccagcgacagcgacggcgacggcgaaagcacgggccctcccggtcccggtcgagtcgggacaagcgaggcccatgcctccccgcgccttttgtgcgacgcctttcgtctcggcgccacgcgcgcaagtcgctgggccatgtggaggcggaagcgacggagacggacggacggacggacggacggacgaagcagctcagcagcatcagcagcatcagcagcacagcagcagcgtgtgaattgtcgtgacccgggaccgggcgcccgcggacccaacttggtggcgtcgctgatgcaactgctttcggctccgagaggaacaacgggaccgtgggtgcttggcgcttttgca

SEQ ID NO: 7570 - DNA, 779 bp, Zea mays
cttgcatgcctgcagccaagtagctcaagtacatcaaattcaatctaaaaggaagtgcagcaaatggcataagagcatgtgtgactgagtgcaaaagcgggaagagaagcttcgacggcagcaaatggcatacgagcatgtttgagacatgttttatcatcaaaagcggcaagagaagcagtgcctcacacctcttgtccgggcgaagggctccccaatgcaaaatcagggaaccgcttgtgttggtcacctccaggctaatctctgacaccaaaccctgcggcgctgggttcactgcgacctgttcccacacaatgcaccaatagtgttatagagataaaaatcgtagcagatgggtgaatgaacctggtatccagcggtcgcacctggagctcggagttggaatccagcgtgaactttccgataagctgcgacaagagcaacggaaagacatgaaaatgaagcaggcaaattgccaaacagtgggagaacatcagctgatgatggcccagcggcgaaagatagagcaggcatgaggtgcttacgtcgggggacgcgcggtccgcggacgtggcgacggcgcgcggcacgacggggccgcggctagaggcggagagcgtcgtggggcggcgctggcccccgctgcgtcggagggacgctggctgcggctgctgctgccgcttccctggcgaggaggccgcgggccgtgccgcggaacgcgagcgcgcaccgttcaacccgccgttggcgttggccgcggcacctggaatcccggacat

SEQ ID NO: 7571 - DNA, 830 bp, Zea mays
ccgcgaattctgagctcttactccatggcgccctcgtctgcggaggctgactcggcggtgtcctccagcggccgtctcctcgtgctctacgcgtcacaaactgggaacgccatggacgccgcagagcgtgtgggccgcgaggcagaacgtggcggctgcccgtccgtcgacgtgctctccatggacagcttcgatcccgtgagctccaaaacctagagccctcagccacacaacccgtgcatgtgcgaacttgacgcctttgtgtgttcgtgcagagtcgcttgccgagcgagcggttcgtggtatttgtcgtgtccaccacggggcagggcgaccccccagattccatgaaggtctggacattttgatctactagataatttccaaggtctggacattttgatccactagataatttccagtcgtctggattgcttattgggattttgggttgtatgttgcgacaggggttttggagatatatgcttcggaaggatttggatagacaatggcttgaggggatccatcatgcagtgtttggactcggggattcaggctaccagaagtacaatgtgagacttttttctgggtaattgagcttgctaataattattatatgctgccatcagtacaaaaacactcactcacacactcacaaagacaacccaaagcagaaagctacatctgactcagtgttccaacactcgattcttcccttctcttctctttctcttcctctctccttctccatcttccgcggctttagagaaatatgggcaggcaggcaggcccaagcatggtgacgggagaagatgcatccgaggtggagg

SEQ ID NO: 7572 - DNA, 801 bp, Zea mays
ctgtgcccaatctatcaattaattagtgtagaagaaaaaaaacatagcaaatcctagtgctgattatgcagaacgctaaaatgtacaagtgtcctgatgtaatgtccacacactctgtggctatggttgacatctaatagcaatacagatacccaaagaaaaaaatatgccttatgataaatatcccatgttcctaaatgcaactgggtgataactgataaccattggtcatacaccagaagcaacattagccactaccgtgtggtaactaatcacgcatgccagagactgacaaatcaaatgtcaacccaccaaaaaccttcaacatcagaaaatctagcaaaacaatctgttggtagtggaaatctcaatgcaggataaaatatactagaggttcaattaatcaagagaatggaattcagtaagttgtgtatcaaattgtaaagtatgaaatatacaactgtcccctaccaatattatccagctagatttttttttacttcgagatagaaaattcactaagcacaactttaactatcactgaaataataagaaaaaaaaaccacagctaacaaaatagtaggtgtacaccagttaggagaagcagccagcatgaacttatattgcgcatcaataactgcacagtacaatcccaaatgatttaaagagctggaaccaaaaggtaagggcaatgaactacatagacatacccaagtgcaacagctaaagtgagagcattcccgatcttggagacctgtttcacacttgtttttgtatgatttgaaccttttcaaagcaaca

SEQ ID NO: 7573 - DNA, 824 bp, Zea mays
cagaaccgatgattgattgagaaaaactaaacctttttttccccattattcagtcactcacagtatgcagtatgcccggatggcctcgatgatgggcgcgcgacaaagcgggcatcttccagccccatgaagcaactcgcttgcgcattttgagcaggtgcacatatgcccacatctagtagggatgagcttcttgttcaggccggcaacgtttctgagaaatgaaatgtgcgagagagagagagagagagagctggctgctgctgacctgtagagaagggagtcgatctggctgtcgcagcagatgcagcaggtccctttccttgctagcttccactgtgatccaccctctaatgtttcttcttcatcatctcgcatcgttagagagcggttcagagcggcagacacttcttgcctgatggaccgctgcatctctatctgcatctccatgcatgcttccagcatctgctgcatgctgctcatccctctctgcacgccactcagctcatctcggagaatgtggatagcgtcccagtcctattacaaataaatgtctggacaacatttacatttatttggaaattatgtgtgtgctgactgaatgaacgaacgaacgaatggcttactacaaattcagaacggtggtgcatggtttgctgagcccactgacgttgctgtgttcggtctgctggcgacaaagctgaagacgacgactgaggtgcagtgtcactgtcacctcgattctgttcgtctattattctgatttcaatatgatcttcgttgcgtgatgaaccaggtccagtggttgctggtatttgcccctc

SEQ ID NO: 7574 - DNA, 861 bp, Zea mays
  unsure (1)..(861): unsure at all n locations
cctcagcctccctgtgcgctgtgcctccccaaaccccggcaccaaaaagggcctccgcgactgcgaccgatggctgccgccgaggccattgccaggggcgcgctgtcccgctcccgcgtggtggcgaggggactcgtgcacgcggcgcaggtggttggcctggccgtgttcctccgcgccttcgccgagttcccctggactgccgccgcggccccgcccatcctccgcgccgccgcttccttcctcgtcccaccgcgcctctacttcctcgccgccaacgtcatcgtggtcgccctcgccacgctcttccgccgcgacgcggcctcatcctcgccgccgggctccagcggcggcgacgcgcagcacccgttcctcgcgttccttggcccggcgctgccgccgatcaccgaggcggaggagccctccgggcaggaggcgccgccggaggtggtgttcgaggacaaggaggcggtgcacgtgaggacgttgcgcgcccagcccccgcggcggagcatgtcggagaagaccggcggcggcggcggcgcagcgggcagtgcggcgtcgccggagctgcggcgagccaagtcggagaatggcaggcggcggcaacggcggtcttcggcggcggcggcaacggcggtggcggagctgggggtggacgacggagaggcgttccggctggctgtcgaggcgttcatcgcgaagcagcagacctggttccaccgcgaggagttcctgatcgcccgcgccgacgccggtggggaagacggtcccgcgatcgccggcgcttgggtggcggtgcantgagcgagtgatcgaacaaaacgcaaccagtgaaccaaaccctgcttgccgctgtgc

SEQ ID NO: 7575 - DNA, 794 bp, Zea mays
cttgcatgcctgcaggcaatccttggcccagtggtctgtcttgccgtagttgaggcaggcattgtctcgggttgcccttaggtccttggtgcagcatcgccatccgtgcctgcacatgcgcggggagctttcttgcactgtgatgtcaacgactgtttgatgagcctaagccccccccccccctcttttcgctgcttctgtcgggtgagctacagttccttggtgaagaggagcttgccaccgatggtgataggatcagccgatgacggttcttcgcggtcatcgacagccttgagcctcatcgtcacctccttgatcattaacgtgaagtctaggagcgtctccatcgccaaagggatctatgtgtacttggggacgatgcaggtgatcttcttgaaaccaatggtttcaagtcttctagtcgaattcactggacgaccatgtgattagttgcgattagggcgacgacctggacgattagttggtcatggtcacctctaatcgcccatctagtcgtcctgtgcatctccaggacttatgtatagatatatatactatgcattatattaatctgtcctggtcacacagccattcataaattttatgttgatatcatctggaatgattttttttacctgtataagtaagcttattgcaccgtccatgtgaacttgtcacttcatgctgctttttgggtgcaaatttgcagcagattgaaattgttactgtcacatttccagtggacgtgtttctagtaactataaacatcataacctaaaacttccttatttagc

SEQ ID NO: 7576 - DNA, 791 bp, Zea mays
aagaagggcagagccgcagcccgcagagggctgttggcaagaaattccagagggctgttggctgaaagcctggtcggcatgagacaaggagaaaagggccacggagaaaaagaaaaaaaatggttttttcctcttcaggttttgcatttaacaagatcaaatgtataaatcccgattatgagatttgggtttttaagaagtgtaaacatgtcaaaccaaattaatatggacaagaatattttagacaggttttgctttgcttagaaatcagacaaaaatttatctggtaaggaatagatttgattatcaggttaaggtttgagcctgacgttgacggatcaaactaaacgatatcggattcgatgttttaatagacattcgatttagttgaacttaaacgaatttcgccgctacctgaatattcgactagaaaacaactcaatttataactctacgcctggttttcttgatacggattgtggtcgaatttataaaatcgaattctcatattcgcgtactagatcgatccaaatagcataggttcaacatcttgaaagatttctaaaatccaaacttctctataatttttggacgacttagatagacagagacagatacgatatcaaaatcaggataaacaaatatgattagaatttagtatccattttatttactgatatcccgcgcttcaatccatagttgttgaacgagagataaacaactagggtgttaaattaggtagattcacgggttaagataaaaaatataacttacaagagtaaagccgtaga

SEQ ID NO: 7577 - DNA, 763 bp, Zea mays
ggcaggcaggcaggcttgcctgtacgtacgtaccttaattgggccggcccggccaagaacaataattcatggcaccaaccgtgtctttcttcccaacctctctttcttccgcgcgccacgcttttctttggccactacccctttacagtgatcgtgatcctaattctaaaaaacaatggacgagcagtgtcctggattaccgtaatgcgctctgagcctctgatcccttgcttgcatggtatcgtatgattgtatgctttatctaaaaatacaggctttagttagacctaataaaggttagtagttccttgcaactttgctgatctcgagcacccaatgatcgatcgacagtataaggccctgtttggttcctctagtcactagactaaattttagtgactaaagtttagttgctaaagtaccctgtttagttccagtgactaaaccgaactaaagagcattaattgctgtgaataatgactgttttacccctattaattaatggatgtttactataagaaaaaagttgagagggcaaataaggtaaaaatactactttagtccattttagtcaccccttggtgactaaaaaactaaagtttagtcactccattttagtcaccatgtttgcttctttagggactaaaagtgactagaatttagtcactaaactttagttacccctaaccaaacggggccttaggtggcgaaatgggaccagttctaatcattctacccagaatgggaatctgtagcaggttcg

SEQ ID NO: 7578 - DNA, 840 bp, Zea mays
gcgccccggcccaggtgcgatggacttgtgggacccatcccccctctcggtaagcccggctcggcccggtccagcccgcttcggttcttcctcccagtcccgtccgtcgcttggctgctgtagaggtcgcccgtcgccgtctcccccctgtccggtccggctatctctctctccctccctgctcggctttgacctcagctcgcaatgaactctctactgcggccgccgctgccggggccgacgcctagactgagcgcgaggcgtcgggtctcgtcgccagcgccggtgcgggtcggctcggcggtgctggccggcggcgggcgcagatgccaacgggggctagcagtggcggcatcggtggctccgtcgtggatggaggaggccggggtggcggtgctggaggagggcgggcggaggaacccgtcagtgtcggactcgtaccgcgcggcggggctgccgcagcccaacgccacggtgctggatgcgcaggcgcgggtgtgcacagggcccgcacagacgcgcccgctcggggaggagcaggccatgcgcgtcctcgacactatcctccgctccggtgagtacggtcaacttacttccttggatacctggataaatgtcaccgcgggctggcgggctgcttcaaaacgagctgattttgctaataaagcgccgctgcttgatttggcgccagtccagcaaatcattgatgcccattattagaatttggaagctaaatgaaaggtctgttgtcttaaaaaacttccgattggtattaaacagcaaattttggtactgggtgggttatgcatgccacacaaaaaggtgcttgttggtaccttt

SEQ ID NO: 7579 - DNA, 846 bp, Zea mays
cgtagacccaagttccggaaaaatgaaccgaagatacagtagctcctcagcgcaaccactcggccaccgaactctttcttcccctcctcgttgtccgtccgtccgtccgtcccacactcgccggtgcaccctcgccgcggcgcggcatatccggcccactccggcgcgccgaatggcggcatcgatccagtcgctcgcgtgcagaggatgcgtggactgcggggtcgcgcgcggaggaagaaggcgccgcgctggagacctggaacgggcaaatcccgccgcccggcccccggcgcagcgccccgcgcggcaggaggattcgcagcgtggcagggtgaacgttgcggcgttgcagtgcgtggggacaagaggctttattccggggtatttggaacctgctcggcacagggcgtggcactggatagtatggatccttctgcgctgcgcgctaaccggggcatttgtctcgcacgcacaggcacaggcaggcacactatgctccgagcgggacatgccaggaacggaattctaccgtttctttcacaggtaggataattggatccattcaagtacgtacgtattgctagctacctagatctgtcgtcttctcgagccatgcatgcgcggttgaatttgtagagagctctaccagatatatagttgcacttttcatcgaaataaaagtggagttatagcatacgatcttaaaggagaatcataaaacccccagtttttatcggagtcgatctccacggcaaaaaaaaataattcctttaaaaaccaaagaagaatggacgaagggatggccacacacacaaaaaaaaatgattgccaaggtggcggaag

SEQ ID NO: 7580 - DNA, 659 bp, Zea mays
aattgcaccacaatgatagggcatcatggcaccgacaggaattggaacaggtacaaacccatatgagggatggctcatactgtcctttctatgggaagaagaactacttgcaccagcatcttccctagcactactggagcaaatgatgtcagcaccctccatgctactgtccagagtaattcgagcttgccttgtactctcacctgtattatggtcattgggaggcagcaagaccccattgggttggaaaactgggtccttgccatgaacatgctgctcttgcccaacaatgcaacgagaaggaagaaactgtatctcacctgatgattctatccttctattgccatatctgtgtcatgttgaagccatggacaagttaaataaagctagtcagagttatgcaatacatttgagcagttactaacatcgacttatcgccttatcggtctatagaagtactaaacatgtaacctcataaagaaacaaatgggcatggacagaaagccatgcatttcagataatttccagccacattcaagaactagatagccaatcaaaattttagactaaagtttaaaaaatccatcagcacaaagtacctcgagaaggcagaacaattcaagtgattaaagatatccttttccctgaatacttgattc

SEQ ID NO: 7581 - DNA, 776 bp, Zea mays
aattgcaccacaatggtagggcatcatggcaccgacaggaattggaacaggtacaaacccatatgagggatggctcatactgtcctttctatgggaagaagaactacttgcaccagcatcttccctagcactactggagcaaatgatgtcagcaccctccatgctactgtccagagtaattcgagcttgccttgtactctcacctgtattatggtcattgggaggcagcaagaccccattgggttggaaaactgggtccttgccatgaacatgctgctcttgcccaacaatgcaacgagaaggaagaaactgtatctcacctgatgattctatccttctattgccatatctgtgtcatgttgaagcgatggacaagttaaataaagctagtcagagttatgcaatacatttgagcagttactaacatcgacttatcgccttatcggtctatagaagtactaaacatgtaacctcataaagaaacaaatgggcatggacagaaagccatgcatttcagataatttccagccacattcaagaactagatagccaatcaaaattttagactaaagttcaaaaaatccatcagcacaaagtacctcgagaaggcagaagaattcgagtgattaaagatatctttttccctgaattcttgattcttgtaatcattacgatgctgttgctttcccaagttggtctcgagaaattgggaggggtaagaatcagcatgacctattacagcactcttcgacttttcaccaagggttcttttcttt

SEQ ID NO: 7582 - DNA, 861 bp, Zea mays
accgtgttattatattctttttttttcttctcaaacacacaagagacttgtgcatcattcattaagagagaagagagtacacaatgggagggcaagatatgctattattttctcaccagtcatatattatcttgaatcatttctcaatcctatagcaatgtaagaaagtgacatctcccacaaagtcaccatttaaaaaaactgtacattgtcaatgcagggagcacatggggccaatatttcaggaatgcggagcttgagaaaatgcttaaccaagatctgtcccgcctataccctgaattgggggacttcttccaaacaagcacatgtcagtctatgcttggacgtgtattgttagtatggagcctcagatacccagagtttggttacagacaaggtaaattattgtcgtctttttcagtcgctgcaagctatttatctcctgaaaaaatggttgataccaactacgtatagccacaacatgatatgcctaagtgcacatcaaccaagtggttcctaatcttatgcctattcaatgtttgtcactatgtggaaccaaaactttacttctaaaatggctacctagttctttgtgtaattattaacctaactttagttgagtacttctacattgcatattgaagcaaaatttgtctggcctattttaggtgactaaacattattttctgccaaaatttgtaacaacatgccaaaacctttttgaacaacttaacaagggtccaaatcagtaggtgtataacttctgttttctgatgagaataaccattcatctgtcctcatcgtatgcatttgtcaacataaatcactttcctcctacaggaatgcatgaactcttaactc

SEQ ID NO: 7583 - DNA, 770 bp, Zea mays
actaattactacttgccatacttttttttaaaatttgtatatacacacacatttgatttgatgtagttgagtgctcatttgttctactcgcattaatgcacatgatgctgttcggtttgatatgctgacaataaataattttgcacttatcctaattatatacagaaaaatctcggttgctcaagcagaagcgcatttctgatggaaagagaactgataagaagaatattaggtctggtgtcagatcgaaacatgattgtttctcatcaaaggctggtttagcaaattttgattctggtttctcaggaaacagcgtgcttggtatgtagtaactggttgcatctacatcatgcatttgtatcttagcactgctagttattgctgttattaactctaaccataatatcatatgagttcagtggatgggtggatgtcaaatgtttctgtatgaagatctgctaattgttttcctaacattatgtacctagacatattaaataattctatagaaaggttaactattgatttatcactatcttgcttttgcatactaaatgctgcactggtacatgttattcagagtctgcttacttttgactgacattctccaaagatttctgaagctccggttccggtcatatattccaaagcctcgtcctcttagcttaaatatgataatggactctagttatgtacttacaaccaactatggttagttgtatggctgtatgagctggttcctttttccttaatccatttgtcttttccat

SEQ ID NO: 7584 - DNA, 853 bp, Zea mays
  unsure (1)..(853): unsure at all n locations
aagcatcattgggagatcttccaagtcacaattgtaactatttaccaggcgtccatcggatggcttcccagctaacgatccagcaatgcttggagagccctcgcccattaaactaatctgtccatctttcaagatcacctttgtaccgaactgtgacctggatttgcacttcaactcactgtagtctgaaggccttctgactcgatcagtggccaggataggctgaggaactttcaggcagagagaccaggaggacgttcgagaatgccatgtaggaagggaacacagatggagataaggaaccctactaacctgcattagtgaaacgaagtcacaatgccagtctactatagaataacattaattgacggagtgtagagcaagtcctaccacactttcaagctccaaatgtactttgctagaaaatatcctgtgagacactgtcatgcaaaaatgacttagcaggccacactcgtcaggtgtaccctgagcagaactctggtaccgaaccacatgacgagatttctccctgagttttctaaggatgtcttcatggaacacatgtagcaggtaaatttctaagcttttggggttaggaaaccctctcacatccttatttgaagactccttcccatttacagtggctactgcaagatttccagtatgatctatatccatatgatcttcctgccctactgtccccgagttattattctgcccagagagatcaagccaaaggcacaaagaacattnctgaccaatcgctaatttgaagaaaatcttcgcacattccagtaacattgatgcccttgagaatggaataaatgtcttccttgaatcacccatatcaaaa

SEQ ID NO: 7585 - DNA, 597 bp, Zea mays
atgcttcatcacactgggctctgttaattattactaagttcccagaatagtaagacatatgttgcagctgtttgattggtgtagcctgtgctgccacggtggttagtgattcggctagcgatgtagcatcagaatgcagctttgaatagaaattggttttattttatcatttggggaaaatttacgcagcggagtatccctagatttattgaagagctggtagtgcatgatgtaggccaatctttgatgtagttactaaattgtatttgcataagtgcttgtttggttggtttatgagatgaagaatatgccatgttcacaaaatactttggattagttcaataacccaataaatgtgccatcagccatgttgtccgtgtagtagtacccagtgtttttaaggcgtcgcctaggcgtccaggcgctcgtataattctaggcggcttgctcgccttgcccgcctaggcgttaaggcggtggtccaactcctcaccccgtcttaccgccttaagaacactggtagtaccaatctttagggcttgggcattattagaagtaaagaatgacatctctttctcttttagggaggatagcgat

SEQ ID NO: 7586 - DNA, 725 bp, Zea mays
cgaggagatgccaccctgcacagccttgagcaccctgtcgtagaaattggcgcccgaccacttctgatgctccagcgtctccacgccgttgatcctctcctccctctggatcctctccacgtaggccagcatgccgcggcgtgcgaagtcccgcgcgaacgtgtcggtgacgagcgcgtcggcgtggaacccggcgagcgtgatgaactgccagacgtagccgaggcgcgcgacgctcgggatgaaggcggccatctcggcgtccgtcatcccagacgcgtcccagttgaaggacggcgagaggttgtaggcgagcatcgcctcggggcacgccgccttgacgccctcggcgaaggcggtgcactcgcccacgttggggctggacgtctccatccacagcacgtcggcgtgcggcgcgaaggcgcggccccggaccacggccgccgccacggaccctctgaagcggtagaacccttccctggtccgcggcaggtcccagtcccagaacacggacgtgacgccgaggctggcggcgatgtcgcgcgcctggtcgttggacacgcacctgtcgtagccgccggtggcgcggtcccactcctggagcctgcgctgcttctcctgggccgcgacgccgaggcccgcgatggcgtccctgacgcactcggagaaggtcttgagctgcgccgcggccagccactcgtcctcgatggcctggagctccctgc

SEQ ID NO: 7587 - DNA, 832 bp, Zea mays
agcttgcatgcctgcagcagactctacttggtaacttattattcctcttgccctactactactgctgtgacacactaatttcatcttgggcattttcttttggattttttttgcaattggaacaattttttaatagatattatatttcacttaggcaatcacttcggaaactgtgcttttaaagtttgagaagtctagaagccagcttcaggagagtctaaggcgcattgaaagcatagtaactgaagatatcggctgtaaggtatattgtgcacgaagctcatctagtcaatatttttgtttcaccaatctttgatctttttcttttatgactttatagttttgcgattattacagtgtgtaatatgaactgacatcctgaacgtgtcagattgtggagattgttggtgaactggagcaaattgtttttacattggatagatcagagaaggaagctggtgatgagctgatcaatttgctacagagaaacaataaaacaaatggttctagtgataatggggagcttgaggtcttccatatttctgctcttaaattgggaattacatcttctagggcagcactcaccgaaagaagagcccttaagaagctaattgagaaggctcgttctgatgaagacaagcgtaaggagcttgttgtgtcatacttgtacaatctcatgaggaagtactcaaagttcttcaaaagtgagactggtgatgatacatattctcagggatcgtttccatgctcgccaacagtattaggcattgatgatatgtgtagtccatacagcaatgggccgtgcatttagtagacatattttgagcagtca

SEQ ID NO: 7588 - DNA, 794 bp, Zea mays
attccactcccggggaggcatcctccgtcatcataccagcagaatggctcatatgagagtgacgacaggtagctaggctgagaaatcgtatcgagcatcagcatggcttgctacattttttttatgatggaaacaagttctaaccttttgcactttcatgcatacagccttagtaacgatattacaacttcgcaaacagctaagaaaagataaaacgttcaatgtttggagccataaacaatttaaacagcctcaattctagcatatgatcaccatctatgacttgtgaagatctccatagccaccatctccaaagattggcatacattgagggcttcttgatgttattcttccttctgctaatctcgcatgctgtgtttcatgctgtctcatgctaatcccacatggcttgctacataaaccacgttaccagtgtctcatgctgtgtgtttctgttgaagcattttgagtatttttttgtattaattgataatcactagttatttaaggagttgatagaatttcactcacacgtgaaatcaagtgtgtaatgcaactcgaaatagcaactgaaaagggagcttagccttgtagtcctcatgcaaaatgtttcttatcatttcaagtttgaacaacatggatgttgcaaaaaaaaaaacttttctacaaccataggaatgttctcccatcacatcaattattgaggttactctgagatccgttattggggagaagctaaactgaaaataaattataaagtcctttcatacctgctaatccccaaagaggtttga

SEQ ID NO: 7589 - DNA, 807 bp, Zea mays
aatcttgcatgcctgcagtacgcctctttgcagaacccttgtcaagaatcttgtagatttcgccagctgagtacacaacttcttcttcaagacctctcacaaaaacaaatccctttccatcttccataagggcaataggttttttcgtcttgtcttcaagaacagggaattttggttcttcaggtgccaacagatcagtgatttcttcattgtaaagttcaagaaaggtgactttcatgctatactctgcgcactgagactcgagaatgtcaaagatttgccttacagcccttgggataacaccagcatcagttgggagttcaccattctagtggacattggaagaacccgttataacatttaaaatgcagatccaagctacaccttcagattatatgcataacaaaatatttaccttggtctttctagtcccacctccctccattgtgtaagtcttcccggtaccagtttgcccataagcgaaaatagtgcaattgtaaccttcaaggacctcatttactatcggcgagatggattgttcaaacaaatctttctgcttggacgatgggccaaaaacctactcaaaatgaaatagttaactaaatctgggtcaaaacacacagagattaagtaaacaagactaggtaaattctaagtatgaacgaaacagtcaagaaattgctcgacaaagtgatataataccttgtcgaaggcaaatgtgcgatcaatctgcttattggcaataatttgagtggcggcaacttcccggcgacgctcattgcacgaaataaccacaggagtattcga

SEQ ID NO: 7590 - DNA, 924 bp, Zea mays
tttcagagccactcaaatccccttcctcttctctacacacacgaacccacgaacgcaggctcccaataacggcagcccccattggatttggaagcttctccatgggacaccgagcctcgtagacgaagcagaggggaccagagaaatcaaagagcaaggaagcaagaagcagggagccatggcgttcctccttcccaagctcacaacgccgtcctgcaagttgcccccaagtcccctcctcaagccccagctcgtcccgccgggccacggcggcggcaagatccaaggctcctccgtctccggctctggcgcggcgcaggtcgcggccccgggccacctcagcctcctgctcctgctcagcgcctcgcagcaggcagccggcccggcggccaagtcgacggcgaccaagaaccggggcaagggcggcggggatccgcaaaggtcggatttttacctcaacctcgggacggcggtgcgcacgctgcgggacgacctgcccgacgtcttcgtccgggaacccaactacgatatctaccggtgggtaaagagagccattttcccctttgtctgtcgctatttcagttaatttttggtaaggtctttcagaatcgatcgcacttgttgtatgaattagattttttatagttagttgctgatcgtggagaagcttcggggggattaaaggtcaaatatatagattgagcaactgatggtcactgactcactcggtgctttgcatagtagatacatacaggaatagtcgccactggctagcacgaacacgatgagtgatgccagtcatgattctagaaatgaagtatgctacagtaattggttggttaatttcacctagccttctgctgcaacggataatttgtcatatgcaattttgagaactgagaatcgataagtgaacactttttt

SEQ ID NO: 7591 - DNA, 787 bp, Zea mays
tctttaagaacatgcttccttctgccatggcatattggtgcatgccgcaaattgtggccttttccaaacgctttgtttgctgttatttgtcaacctatctggatttagtttggctgcctttttctttgaacttcatgaactaatatataaatagtcatctgagatcctttgcaaaaaactgtaaaatggtcatgtagccacttcagcttttattgtctatgatttatctgttatgtactgtcaaatcatagtttttctttgcgatacttaggcattaagaattcaatgcagatgaattgccagacaaatggatcagaaaataatgcagccagcaatcatgtaagtaccaatgttgctaatgggtcaaagacaggagaaaacaatgatgaggaaagtgatgcccaagtaagtatctaaccttgcttacagcgtacctgttcaactggcattaatgcatgtgttaagtttcacatttgcatccctgcttagcttgacaacaccagtttaatagaaagtaatgaagtttggcagtatagcactatagcatttatagacatgtccttttctatgatggttctttttcttgactttaacatagtgagtgtaactggcactgtttaatggaatcagttagagttcatcatttcatcctttatgcggttctgatataacattcatattggatttctttgccatgttacgttatggagactgttttgtcttgactagagctttgtaacaaaagggagactgaaataaaagtgctgagacgttaccagatattcgt

SEQ ID NO: 7592 - DNA, 845 bp, Zea mays
aagcttgcatgcctgcagaaagaatacttgcagatcgagtatactagtactaatcacggttccaggccatcagcagcccgccccgcccatctttctcgtccttgagagctgaacgcgcgctattttttagaagggtggagtggagagtccccattggccaagcgaactcccaagtcccatcccaccatgcatgatgcacaccggaaataatgcgcgggggagcaggagcccgtgtttagtcgcagcgtcagtgcttggtgttggtgttggtgatctcggcggcggcgttccaccgatcgagcgcggttttagatgagcaacgagtaagataaacaggccactctcaagctggtggctacttcccctagtattttcgatcttcgtaagctcgtgatcatcatcgattcatgcatgggtttactaaatctaacaacacaagaaaaaaaaaaagaggagagtcgtctgatttggcggcaaaattaacacagcaagcacctgctgctattgcctcagctgtagtaagaatatacctctgcaaaaagtcgggaaaaaaaaagctacagcagcatgcatccaaactccgaagcgttgtacaatttggcttgcgctgagctgctgcctgtcgctgccgctgctggtgctggtgctggtgtgaggttgttgttgtgaggttcggaatctggtcaactggatgcgctagctgttcgcacaggtccaaactctggcgaggtgaaaaagcaaaggctgctcgagagagagagagagagctcattcaatttcatctactgtcttttcagtatgggttggggaccctggctgggggagtccggatgtactgtcattgg

SEQ ID NO: 7593 - DNA, 744 bp, Zea mays
cggtacccgctgatcctgtagagccgacctgcagagcataactaaacaaagccactacaatgttttttttgaacgtaaaggcagaagctctgcttctcaattaagaagaatggaattgatccagttttaaggaaaaccgggcccaaaacctacacagagcgcacagtagaaaaaccggcgaaggccctaacaaacagcctagacaacgacagcctcccacacacaaacacatctagagtcatcgttgtcaagctcaaacacaagggacgagcagctctgacttcccaagacgagccacacactgccaaagcaactcgacgatgcctacatctagacacagacgcaaggaataagaccgcggcacgccatcgttgccaagcctcggcacaccccacatgaggcagctccgattcttcaccacgagcaaaagatccacaacaccgaactccgggagcaagcagacgcctaaagcgacaatggccccgacaccaccgagccaagcggagtgacgaagagcctccacaacgccgacgaatacacaaattggtggtcttctgggtcgcgccttcaagaaggagaaacgacgtcgaaaagccgtcgccgctcgcctggtaccaaccaagcaaagtttcctccgaagacctagcagatcagcgtagatcgccagcaccaaggagaaagttgaagggtcagccacgccgatgtcaccccgccaagccaccgcgcgttgtcaccttctgccgt

SEQ ID NO: 7594 - DNA, 784 bp, Zea mays
agcaacatgatatcatggtcaaaccttagtagagtgccgagcaaaattttctaggaatcaatattttttacctgcatactcaggagccaagtacccaaacgttccagcaagtctggtcgccacagagtagttcccatccggcgcatctttcatgagcccgaagtccgccaccttggcccggaagtcgtcgccgaggagaatgttcgctgacttgagatccctatgtatgaagcggtggtgccccaggttgtgcaggtactccatcccacgggcaacatccagggcgatgttgagacgcttcttccacgacagaggctccagctgcaactgtttccagtggaacaggtgcttgctcagagccccgttgggcatgtactcgtacaccagcagcctctcgttcccctcgatcgcgtatcccagtatcgacaccaggttgcggtgccggaccttggtcaggacggcgatctcggcctggaactcgtccaaggccttgttgctcaccgccacggcctccatcctcttcaccgcgatcatggtgccgtcgtgcagctcccctctgtagaccaccccaaatcccccacggccaagcacattgtcctgggcgaagttcctggtggcgccacggaggacctgcaccgcgatcacgaaacttccggcctccaccacgtgcacgtcgccagcctggccgctgctgctcccgctatgggacgtgccgctgctgctgccgtcgtcgttggtggccaccacgatcttggccaggttgtccggatcagagctattacgg

SEQ ID NO: 7595 - DNA, 788 bp, Zea mays
agtgagtaacacgacagaacaaggtgcacgtacggtcccgcccgaccgccatcgagatgccatgtggcgcgtgcaagtgccggcaactggtgggtgccgccggctgagctgtgtgtgcatgtgctagtgctttggcgcgccagccggcaggagtaggagtaggacacgcgttcgccgcccggatgagccgaacggaaatcccgattcgttgcacgttgtcgcgccgctgatcgtgcgtgcgtgcgtacgtggtccaaggctgcacgccccccagtccgttctgcgtccttgcgcgcgactagtcaaaccgtggctcgcgcgcttcggtggtggcgcggtgctagctggagtaggtgtaggtgccggcgcctccagctgtgcgtggaatctggggaacggaagcatccatgcaacagctgcacagagccgcgcggcgcggcgacaactcgatgctgtgccggctgcaaagccccacgactgcttgtcatgtcatgtcatgtcatctctctctctctctctagatctctctctctctggtaccaaacggacacggcacatatataattcatgccaacgcttttgctgtctgatggtggtaggaaatgataattaaggattacaaacattatatgatagtaatacgtttgtaccacgtgtatatatagcccacgtccttcagatgtgtgcacgcacgcctatgcatttctgttaaaatgcgattaaccgtcatggatactagattaagttgctttctctcaaaaaaatggttttggcttctagagcacctc

SEQ ID NO: 7596 - DNA, 821 bp, Zea mays
atcttgcatgcctgcagaaccactacacacaaattaatttagtacatcgataagcataataataggaaatatgagccatatattatttaaaaaggtaaaatttactaaagaagcatgacgtggaaaatgaacaagttacaaggtctatgtgatctttccaataattcacaattaatcaggtctagtccatgtaaacatatagcccaccttttcgtatgaaatggctcagccttttctaattaatagaacagaaatgtttttatgacttgcataagcaataggtcgaatcctagcaaacaataagtactattccaccatttcattcctgacacagagattaaaaagatataggagtacaattacctcatcgaaaacaggcacacttccacctacaagacctgtgttgccaccttgtggaaccacagccaatcgtttggtgttgcaatatgaaagaatcttagatacctgtaaagagagcattgaataaagaatgtgcacacttttttcttgtgtgtggataggagtagcaagactaaaaaaataaattattaaaaaatcttcatgaaaaagtgtgggctactgaaagaatcagcatgcatgtcatttgcatggattttgcaacacccttgtatttgcagaagtacaatataaagactgaacaacaccagtaaattattctttaaaataatggtacctacattgtgaagccgtacatgactttcaggaaatggaattgcagctacatgatgttcaggaaaataaggctccactagattgctaatgaaaaacctcaatagtagtttttggtaaagtactagctg

SEQ ID NO: 7597 - DNA, 777 bp, Zea mays
aggaaatgcaagcactattatggctaatctctgtttgtttggctttaatttgtaccagcttagagcatcttcaagagaggcctcaaactgaaattcttttttgaaatataggagttgatactacaaaatagcttccaaaaaagttgatattttataaagtttcaacaaattaatatagcacatcaagcatgaggtggcaaatataacacctcggcctgatgggtcctattcctttccgatgcaataatttttttggttacattgcaagaaaatgtccgcctactccccgacgcctccctcccgacggagcgccttccttccggttcccactcaccactctgtgcagcatggaggcttcgtttatcactctttctccgtcagcagaaaagaaggatttctttggaacatgttttataagaggacaagacaagtgaaggcttattctagatgctgatgctactgaagttggctcgtcgcatgagagcaaatgccaatatgctgatgagcacgtatatttgacatttaatcctttattttgtcagacaacaagctttggcaaataatgaggaacaaatgccaagatgctgaagtttacttgtcatttaattctttattttgtcagacatcaagcttggcaaataatcaggaagagccgactgctgcccagcggaaaatgagagaacgttgccgccaaaaacgacagaaaggctaggattaactaaataacgtgattattggagttactggtgggaagtcaacgaaatttgaggtcctaat

SEQ ID NO: 7598 - DNA, 802 bp, Zea mays
agtgtgaaagtgtgcagctagagctaaccactgctactgtccaaaacgttccatgcgcgcgcgcgcgcgcgaaacaagttttttttggttctccttgcgtaacagatgagacgagacgagacgacgtgtccaccattacgctacgctcaccgttgcggctctggtccatctctcacctgcaccagaccatgccaacctctgacacgataaggattgaaagttggaggcagcacgttacgtacaagttgcatgcatgattttgctcgatatctatagctatagcagcatgttggggtgtgctgtgtgcaccgctcactataaatacaagagcgacgacgcaaccaaggcacgcttcgcacttgcaatagttcgtcatctccaagtgcgtgccctggccgccccctatcccgccggccctgtgtgtgttccccgctaccagccatggcgtcgccgttctccgtgccttcgctggtcggtttcgattcactagttctatagacagatgctaatgctagacgcctaggcgtacgtgtgcatgatgatctcgtacgtacgtaactgataataactcacttattcgtcccgtgtggacgtgtgtgcattcatgcagatcatggaggaggaagggcggttcgaggcggaggtggcggaggtggagtcctggtggggcacggagcggtttccgcctaaccaagcgcccctacaccgcccgcgacgtggtcctccttcggggcacgcctccggcagagctaccccttggggggagatggccaaagaagctgtggcgcacgctcaaggcgca

SEQ ID NO: 7599 - DNA, 776 bp, Zea mays
aagactcatagctggcgaaactttgggctttggtgttttcaatattgaatccaagatatcattctgaatgcggtgtggagtacattccctgaaatgataatgtcgttatgtcatgtaaggtgcctcataggaatagcaaaatggctgtcatctgaagactttataatatgtatttaactacagttattgtgaaagccttgactcgacaagctagaaacaagaagcacttgctgcaatagcaactagagagaaaggccaagatttcggggtgcataacaactgaaagcatgacaccgtaatcacccaaaatgtcttgcaaaatgtcaaatgtctgaagtacatctactttatgacattattttagacaggtgcagattataaacgcttcaatgctcaaaggagattaccatagccacataagcagaagacaactaagatgtatttgcatagtggtttgcatgaaccgatagtgctcttcacgtgttgacttatgtccatagctaatactgtgttcacgtcaagaaaacttaaaaatgccaacacaaatatgctaaactgtcttagatatgtcacatgaatgttcatacagtcagaccaaaaatatcaagttatatgcgcactcaattgattagctgcatgtcactaaaagaaaaaaaatgtctacaaagaaagattcaaagattcaagactccatcaagatgcatgcatatttcgttaaaatcaaaattttccataacaagccaaatcaaactccagtgtgtggggtgacaggtacc

SEQ ID NO: 7600 - DNA, 745 bp, Zea mays
gggtgttggtgttcgaaggattcctgggtactacaacaaattgcttgatgacaggactgagacattggatgaaaaggatcctgtggacccagtggtcaacgaacagggaagtgcacccagaaaagttacccagcctgagaaatggaaaggacagatagagaaggttgttttctgcaacagttcgaatttagaggaagcatgccatggttgacaacctctagtgtttctatacacttgatttctgtttccattacaggatttgccacgaacatttccaggacaccctgcattagatgaggatgggaggaatgctttgaggcggttgttaaccgcatatgcaaggcataatccatcagttgggtactgccaggtaaattgatgccaattgaaggaattttgttttttttatctagcctcttgttggcttaattgtattgaatgagatagattgtaatcctaattggtgcatgcaaactatgaaaggtcatgtctctgatgttcagttgagcatttgagcaaaattgtaatgtatgaccttaatttttgagagatccattataagctatgggcctatgataagtgatacattttcaatcattagttctggatttctgttgagcaaaatgttgcttataccatatacctattgtagcttcagaagggatttgacataatgtaaaaccagtgaagtctatctccacataaaaagttttattgtagccatctttaccaggtcaggaaaaaa

SEQ ID NO: 7601 - DNA, 812 bp, Zea mays
agcttgcatgcctgcagtaaagaattttcagatttatgttgaaacaagaaaataggataaatcgtcaatgctagtaatatgctagcatacgtgttgtttggttcacatatttataacacgataggtaactgataacgttaaaacatatttgtttaagtccaaccgtaattgaatatcaccatagaattgatatcggcctattcaaactttttactagaacttaaagtttaggccaagccatttgaagctagcacggcacaacacgaaaataaaagaccaaagcacagcctagcacgaagaaaaatggtccaagccggcacggcccaaatgtcgagccgtgtcgtgtctcaaacttaggcacgataggcagcacggcacaaagtgaaacataaattagaaaagtagcatttaaatgattattccatactccaataatttttagctcttcagaaacgtatagaaaacattgatttccatttctcatatgatttttttaatctatagcaaagttataaataatataaagatatatttttagatatacataagtttttttgttcttgtcgtgcttgggccagcacggtaggatcatcggcccgccgtgctttagggctaggtcggacctaagttttagtatctaggcacaacacgactcagcccaaaattatttcatgtcgtgctagcccgaaaaaagtttgcgcaaaacatgatgggcactcgagtataaatcagtaccgttaccatttaagttacatttcatgaaccaaataacaccataatagtaagtaatagcaagtatattaatcaccaac

SEQ ID NO: 7602 - DNA, 771 bp, Zea mays
cttgcatgcctgcaggtcagggcgggttcagctcgattagcaggcttaatccagcacctaggggtggtaatggatcgcgatccaaatgcttcttcacaaaaggttagggtcctaaataaattttagttcaaaaatgaatagaaatagagcccgatcctagtccgatctgatccttaaatcttatactgtaaaatttagagcccattgtcacccctaccagcacctgggtttgattctctgtggtacagtggaagtgaatttcagggttggttaaaaacctcccttgctggcaacctgtgaaatagttgcagggcactaccctatgataatggtggcagttggcctgtgtgactgactggtgtggtcctacctgagggtagtcatggggcgctgaacctgggctgtgtgcctgcggacaccagcactgtagggtctgcattgtcaggattcaggcggtttgtgtgtttaaagactgccgtttcttcttccaaacaaccccatggggacggtttttccctcactgtccgaattatagttcaagcacatgatttttattcacatcttttagagcactgcttctgttctccttgtatcacccttcatggagaatttccagcgataatacacttgtatgtctatcttacgttgtcttgttttggatttatgcattaaggattcattagggctatataaagtttgtctataggagacattcatggcaagttatggcgtattcatggttcttaaagcggaaatgcgagtcaaggcgtt

SEQ ID NO: 7603 - DNA, 835 bp, Zea mays
aaaacaacatggtaaataaaccaaatatgtgtacaaaattataccacggtaccacacattcaacaacaggagacatcggtagcattacatgcacatgattcacagtacaagacaatgtcacgaattttacttatacatttaagaaacattaatttttattgtagaattatgatgcacaatagcacaaaaatattcttgaaggaaaatcttgaaactatgatcactgatatgggtaaaagttacctagcttgtggagtataaatagtacgtgcagatttacgtgaaaagtaatttcattttgtttatgttttatgctgacatataaaaaactcagccggtagaggaaagaccacccccacggtattatattaagaagctcaatcagagccccgactaagaaaggtcacgaaagctagcccccgtgcagtatgagggtccgccccctatagaccagatctttactcatgctttgagcccctctaagcccctacacgaggatccgccccccatagctcaatccatctcatgtgcacacaagcaagggaaccagcgagtgaacttttttaacctcaacctcaaattcacatccaataggattcaaactcaggatctgaggagtgctactcaaaccactcaaaaaactcagctagaggcactttcacgttttatgctgacatataattatacaaataatggtcatggatgtgtattagagataatgctaaagtttaaatggagatgacattgcacatttcttatggggtgtcaactaggggggcagaagcccataggatcaactatatggatggatcatttaggaagtattgggttggat

SEQ ID NO: 7604 - DNA, 799 bp, Zea mays
agcttgcatgcctgcagtattgcctattggcatcccttgtttcagagatgtttcctgtagattgggccaactacaattacaagaagatgggagggtcatgctaatagatttgacccaataatcataacgggaattgttagaatttgaaggccaaatatgccataaatcgaatatgtgtttatatcttctcatgtcccatcatttgagttccaataaaagtcacttctttcagtggagtaaccgtacggcagatgaggcccataaacgacactaccattcaaatatgtcatctggtccacttgtgaccctggctgataagcatttggaacattggcttgagctgtggtgtttggaactgaatagatgttagtattgacatctgtcgggttagcctctgtccggctccgggccgtccgtttgttgtctacaggactgtctgcactgagtctatccatttgctgctgaatttcattcagtggattacaacctaatttggatttcacaatcttctttgcatctgaagacttgaactcaagccgatataaggcaaaagcatcgcactcattgatctcatattcgtagaggtgccattcatagctgttggatggctgtggatccatgtaataggacctcttcagacccccaaagtccttcatcacctgcttcctagattcatgccaaccacggccgccgtagtctggcaaggaccgctgcttccgatttccactaacaaatgccctccttggtttgtcaaaaaacaaccattctctgatagactcaccttcaaagatgtaaagac

SEQ ID NO: 7605 - DNA, 776 bp, Zea mays
accgagggcctcatcccaggtaacatgggctttttaccctgggcaaaggtgaaaaaaacaaacatttgccaggacagccagccccccggggcaagccagatcatggcgtagcccatgtcgccgctgcctaattggctggttgtttagtgcgtaaatcaaggcggaagctaggttaccaataggcacagctcagccctactaacaggatttggatttgttagtagtacgtagctgttagtactagctaggtcctggtctgatgacaacgccaacgcgtgtgctggtcatgtagcagatggccggatcacgccatgcatggcctgtccaagctttaggaggcgtactcccatctaaggatgcaagatctgccacaggttaatactgccaccaccaccaccctgctttcttattttaatgggagtacatgcaaaggctaaccacatctatccaacatcaagataaggctggctaccagtctaccacctgcccactaaccatgcagcagtcatattttagggctacgcaatgaagctatactgtaatcacaattgttgaagaaaaaaagatcaatcaacatggagcaagaactaataaccacacagttttcaaccttcaccttcagttgcatacttgcatgtcgaaggccggaacagcggtacatgtgttaacgccacaccagctgggattagagaacagatagggttcgttcaactctacaacatacaactggaacacatcttcaacggtatgtcgtcaaccactctatagacctcgag

SEQ ID NO: 7606 - DNA, 822 bp, Zea mays
ggtacccgggtatactctagaggcaacctgcaggcaaaacgatcatgccccctttctttaccgctacacggatccactgatcatcttggtccctcacatcaaagtagccttgagaacataagggtaaaaacgattaagcatcgacagtaactagaaagaaaacctgctgactattagattttctgtcttcaaaaaaaatgcttccagatgcaaaacaaaggcacctaccgctaccctcaaggcaatatcgtatctcttcatcagtatgcaagtgttcttcaaagaaattctttatcttagcctcgtaatttggcaacttctctgggcacacatcacaaatgtcctgcataaggaaaaatgcttatcatactagtctgaatctttgaataggtattgaccttgctactcaaggtagagtaacaaaacaacaagtgcccaaaaataaacttattagcaaaccatgtaagagtaacccctggcttcacgaattttcttgaggttctcatcattctcccaatcatcagcatttaggcgccagcttaatattcctagttctggatgtccatgatggtagtagcattcagcatcagttagtatatgaagatgtcatatgggctcaggactagagcagggcatgtacaaaccggaaagtttgtcgagaggaatgaattctttgggctcacgatgatgaggaagcctctggtcctcttcactgtcgtccatgtaccatgcttggatgacctcctccttgccaacctatgatggaaataaccattcaacgatataatgtcggaatgcataatatggcaagcacaagcatgt

SEQ ID NO: 7607 - DNA, 768 bp, Zea mays
agggcgggaatggtggcggtgctattatcgcgtgccaccaccgggagtcgaagccgctgttcaatgccaagtccaggaagctgggcaggacgctgagctctctgtggaagaacaggggcttctcgctgtaccagtgctaggatgcatgctagagtagtactaagtgttttgagttgatcagtgggttgtgtacatcgtcttgtgccttgttttccgcttggtccttttcctcttctctggggtattgttctgtttcggggtaagaaagaggagagtgaaaaccttggtgttcttcctccacctactcggtcggtggggtgatgtagggcattttccagtttggctttggccgtgttaagagctgtgtacagtcgtttcttctttacaggtctccggttctctgtcagtgccagtgcccccgttttcagatcagacgcttcttctccttgtcaattcaaaaatcaaaaccaacacgacttgcagctgattgttcccattcctgtcagccttttaaagatgacgacccattgcacattgcattcttctgaggtgtaaaagcgcagctcttcatcagcctaaccagagttgagaacagaacaggcttgccccatggctgactctggctctgactgagatttcactaccgaaagacaggtgatgcgccagaaagctgctggctggctagggcactgctgtgcctgtgtgtggcgacaatgtaaggaaaagaaagtgattaggcgagcaatcgcaagtggaaagggaaataat

SEQ ID NO: 7608 - DNA, 730 bp, Zea mays
catgcccgacaagaccgtctgcgagaagcactatgtccaggccaagaagcgctccgcctcctccgcgctccgcgcctcgctccgccgctcctcagcctcctccctcgcgcccgtcttcccattctcctcctccccctcctccgccgctcgcctccgcgccgccgacgaggacccgcccatggcggtcgcgaggcccctctacggcagggtcgccggggaggcggtgtacgtggctgaaccggtgccggcgcccgcgcggagggaggtcgcctacgaagggctgcctcggggcaatgcggctggtggcaggaccgcggcggtgagttcgcctgccctcgtagctgcggcgcgctgccttcgttctatggccacgtgctcaattgggttcctgtgctactgagctcgtggtgattgcgtgcctatgattgcaggggctggtcggcagaggcccactatggtttcctggtggcggcgctgaagggataaggagttgccaccagtgccggaaggctgggggtgtcatctggtgtaccagctgtgacaggagaggctactgtgccagatgcatctccagatggtatgttgcgctagagtgtagcagctcacagtgaactaatgcatattagaaagtccctcaggctccgggattggacattttatattattcttagtgcaaccgcgttcgctatatccggacctgatctgtatatccatactgaaataaattttc

SEQ ID NO: 7609 - DNA, 865 bp, Zea mays
aggaaggacctgtaaagacaagtagcaggacgaacgatacatcagcaccacaaaaaacaggaagcaggtgcagtactctttgtactaatactaattaattagttcaaacatggttttgatagcttctgtgatttcaaggcagtaaaataggcctgttcagttgtttcctatttctcttgtcagggtggataataaacgtcgcccattttgggacttctttggtcggtctttgaaagttgatccagctcttgcagatcaggatgtatggatgctgtactgtatgtttgcagtttgttttgtgcactaaagaacacatcaacattttgcggttaaacaatttccaatatgcatccttgtttcatgaacagtccttgaccatggctctagttaattactgaaaattaactgtggccttcaaaagaataccatataattttatctcttgagattcgtattgcagcgtattcctaaccttatggtattatcccatttttatagctgatcactgtcgccaatgtggagaaggaaggcatggagtcaaatgacatcctccgcttcgaacagttaagacgtgagctggttgagttagaaaaaagagtgaagaagagtgcggatgaagctcaaaaggaggaggtatacctgtttaacagaatcttgaaatagcaaattgctggttcttcagtatttgagcaaactcttggaacaggaccttagcagtgattctgtaatcgctatgagcttaattgcactcttgcattgttagttctgttattttctgagttttgcgtacatattttttcttgttcaaaggatcgtctattcagtcaagtcctgttttccaggagatggttgtcgcagaaaaaac

SEQ ID NO: 7610 - DNA, 776 bp, Zea mays
aagccagctgaggtgtttgatcatccagagcttcaatgtgccactgcgatggattcaacaagcgttcgaatcggcgaacgaagtagttgcagttgcagttgcagcatagatcggctctagagttcgacgatttgtaatttaattgatgggatgattgagtatggtggttcattaatttatgatgagatttatctgtcgactgggcgccttggatttgcaggtttaagattgcaatgtcggtatagtctctactcatgcaggtttcagctaatacagacaaatttggaggtggccaggcctgggctgattgaacatatagctctagagttttgagtttttatcttgtgaacaagttcgaggacagttctagtttgtggcatcagattgatatgtacgattcgactgaaatggtttcagcttccggctaaactacttggattgacaagaagcgggtatgcaacttagcaaatgtgatgcagtgcaacgtgctcaagaaatctcagcaaactttgttatttcttgacaagcttttctaaactcaacttataataaagcaaaaaaagaagaaggaaatgctggattctctctttagatgtgtacagggtcgtacctgggccccagaggggtccagctgggcggcccgccaggacctccaaaatattagggccctcaagtatatactcaagtatagtatttggttatttaatttgtttaaacaagtttgttcggttggttcaatcgtcccaatgctaagcgaccagctcaacctctaatgt

SEQ ID NO: 7611 - DNA, 853 bp, Zea mays
cgatttcatgagatcatgctgcttttttccggaactggtggcaccatatctttccgcctcacctattcatttccattcttatcaattcttgcaacagttgttagaaagaaacgttagttggtaagtggcctgcttgcgttagtgaaagaatatactgctagaacgcagcagcgactccgctctggtaaccgaaatgttttcttctccaaaaatgtgaggagaattggtagtagctagctagttcctagctgtgagagtctgtgacgaagaagtgcaatcaatttaggaactgtaaatttgatcctagtactagtaattaacctttaatttaggtgctactcgacctcctcatgataagaacaataatgtagcgttttgattttgacctggtcgaatttattagtaaggaggatcatcgatcatgcgtggcgtctgtctcgtcgtcgtcgtccacgtctggttgtctcagtgacctcacaaaagccacgagcgcgcgccgggcatgcagcggccgccggcgacatgcaatgtgttaggtgatgagatgacggtcagaagttggccgacctttttcttggcaaggcatcatgtggatgggggcgatgcatgcatgcatgcatgcatgagagccaataatataattcgcaggcccccacggcaagtgaggcattaatctagtgctggtgcacgcctgccagcttattaggccccctcccccggatgccatttgcagttgacttgcatcgaaccacagcattggcatgcaaggcgttgattagcaacaagaggggaatctctgaagcgaacgaatggcctggaagaaggttggttcagattatgattaccaaattgc

SEQ ID NO: 7612 - DNA, 787 bp, Zea mays
tgcctccctgccggcctcaaccatacggatacggctgtgatgcttctcgctcggatatattgcaggcacacgcgcggtctcatctaacccccattcgcggcgcatttgcagggctaaaccggtgcggcaagagctgccgactgcggtggacgaactacctccggccggacatcaagcgcgggcccttcacatccgaggagcagaagtccatcgtccagctccacgccatcgtcggcaacaagtaagcccagaacccttgccgagccgagctatcccctgtccctgtccgtcccctcccattcgatctgtggcagagaccagcacgtttcctctctcatgatgcatactcgctcactcacctagctaaagagcttgcacggccagtgtgctgccgctcggcccagcttccccactgttgcaaagcatcgcgccgcattgagcgatgcggtgccacctccgtccaacgtccatcgctctcgctctcgtatagtatattcctatttctgccatgatacttggtgattgctactgctgggacttgaaagtatattgatggtctttttttttctggtgttggtccttcttcctcaggtggtccatgatcgccgcgcagctccctggccggacggacaacgagatcaagaactactggaacacgcacctcaagaagcagctgcgtcggatgggcctcgacgagccccccgcccggcccgggccgccggctgcccctccgcgcgccacatggcgcagtgggaaacggccaggctcgaggcggaggcgcgcctct

SEQ ID NO: 7613 - DNA, 723 bp, Zea mays
atgctgaactgtgttgctggtacaaagaacacacaactatttaacctgtaattacattatgtcttgattatctatcaataattaagtgcaaacaaagcttggcctcaatgtctttgtctgatggtttgtggtcatgagtatttgacattatatttatttccaggattgcgtgaatatttttcgcaaacagatgaaattcatacagttccaaggattccggtgatgcataccatggttaatgcggcctcaatgaaaaaggaccaaaaccttcaagaaccagactcgaaggccaaacaagctgataacaaacatttggatatggtagatgaagagtcggaagatgatgatgactatcaagttcctgatgctgatgtggaggtcaatgtcttattttacagcgaagccctaaaaatattcaccctactcctgtactatgctaaaagttttgttgttcgtcacttcacaataaaatttcattgcacttcatgtacaggaagaacctaccaaatctgacagtgatgctaagaactcaggttattttttattcaaactccattcttgtagtttgattgatgacttttataggtcgccaagtcatgacttaaccctgacccctttgccattgtatttgatggtccttcaaacccaatatatttgtcttgttttcgggcattattcgtcacgaatcaaatgagaaaagtcgtacctgttgggcaatgcctg

SEQ ID NO: 7614 - DNA, 739 bp, Zea mays
cggctttccccagcaagcaaggtgtgcttccaacactttgccgcactatccaagacccctgaagaatttgaacgccatgctaaagtgagaagacggcacaccaaaaaaaacacttcaacactgggacagacctttggaacagatgggataagcttcagtctgctgtttctaaaatcatcatcaccatcggcaaaacgctgcaacagcgatcctttcttcaaggagtttgagacaaaataaaggaccaagctgtaatgacttggtccaggaatctgcaagagagaagtgacttaaccagggtaacccaagtatagaagaaaaaacatcaatatgaacaaacttggaagaaagccataagtttatcttttaattctcaaaatcagctgcggaagtaacaaataacaaccacgcaaaaaaactaaaaaaaaaggcatgcagatcgttgtgcaaggtaccaatgtaatttttcttgtactctgtgcggtcacctttctgtgagaaaagatcgaagcaggacagaaataaatggacatggtaacatggtaggattgttagaacatgagcttacttgtatgtttaccaggaaagtgaacattcccttctcagcggcaacctacattagtaaaggttcagttgaaatcgtcatgtaatagaagcactgtattagttaggagccggaacactaatctaaatctaggtccaacaatggtattttatttgaaaggaaagtttggttgac

SEQ ID NO: 7615 - DNA, 748 bp, Zea mays
ttgttccacagcggtttaatatataggaattaattgtcaagattacctaaaacatactatacaccatcaagagaactacaagagttaatgcttaagtcaatccatagccattaagtgtatcatggtgggaagtatttctcagcttgtcaactttagccgagttgaaaggacaatataagagaaacacttctctgcaaagcaaagctacaccctagttagttctgcatttgcaacaggacaagataaacagaaaatgtgaaattttgatgcacaaaatcagcattaataaaaaatggtataaggacattaatatttttgatacatagtagtactgtaaagtagaagttctgagggctggtgagctacaggttcttctacagcctaagcttctgggctaagttatgctactcctgggttaccaaattcatgcagagaacacaatccttaaaagaaaactaacttcttaccaagagtcatgaccttcgccagtttttggttgagacaaatcagcacttgtgtcccatattttcaacgtttggtcatcactaaataacaagtgtatgacattagtaactactctagggtaaaccccagcagaagagaaacattaatgaaagaacagtcaaacaaacctgcatgtgaccatcctgtcacctttaaggttaaaggataatgcccatactgttgatgaatgaccactggaattaagaaaaaatgccacctatcaaacaatgcaatagtgcaagtg

SEQ ID NO: 7616 - DNA, 781 bp, Zea mays
aagaaataatttcagatttactatttgtagatctacagccataagtactcatgtactgatgctaattaagcttaattgaaagcatgattgcctgggagaataatactaaaaaatctatctcaaactcgcaagagagttgtgtatggttgcattaagaagaaaaagacaaaaaaaaatctaaatgctcataataactcaggtattagttgatgaaaaggaggaaggcacatataatataatgcgtggaggcatgttgagaggtatagtacatacctgttgggatgaagaaagtgaagcacgacaagcatctaaatacttccggcgagtcttgattgattgtttggcttggagcattggcgggaggctctacaagctgtggtctttttggtggttccttgcctgtttcttgccttactgttctctttctctttttaaggatgacccttcgagttatgcacgatttgcagttggggcaatagaggtcatgggtttcttgctcgtccagaatcttctcaagatcatactcttcaactttgacgtcgcccttactgacttccttctcaacttcaatttcatgaacctgagatgtgctcgtgctgccaccagaaacgtggtcaaggagagccactccaacttggcaagatgtgcctgcctgcccctcgcggatggttgtgatcagtttgagtccgtccgcaatggtcgtcacggtttcactgctgctggagatctcatgcacaccattagagtgtgaaccattttccaagttgccattacttcaact

SEQ ID NO: 7617 - DNA, 806 bp, Zea mays
tcacttgaaatcagaacctcgatgaagacgtgaagactgatgagaagaaatggctttagaaagtaaaaaacataacttttgctcaatagattcaggaaggatgtcaagttcaatactgctctccacattaatacaatcttcaaggcagaaagcagacacttgtgcttgcagcaatcttaagatttgccatgagttaagctctaacatccttagtttctggtcatctgaaacaagatgcactcatcatctccgaacagtgaaagctaagagtatttaatcatataattggtaactaattcaatattatgatgccaccaagaattatccccggaaaaaacttattaaaataatttcaagttcacgaccataaactatctattccttctgattcatgatgaaccttaatgcacctaaaatagaatgtaaaaataaaatcacctgtcaacgaatttaaaagctttggaagcacgacaccaaaactattcttcggaattggtacaccaaatagaagagcaagagttggggcaagatccacctgacaaaggaggtcagagttgtatattgatctcttgggagtcaggactatctttaagattactgtagttatctatccagcatgaatggggagaacataaagcctactgactggaaaacatatcacatacagcaacaatgatttcttggctgaaagaatatgcaaaaattgagcaacacaaacatccaaaggtgaactagaaggtagactttacttgaagtgcttcatttctgtcatagggtgaacaatatggggctctcaacgctgtgtc

SEQ ID NO: 7618 - DNA, 822 bp, Zea mays
accggcgatcctctgagtcacctgcagctcaggggggcctgttccctggatctcgccatcgccattgccgctgccccccacctactactcctgctcctagtcctacacccctcctactccaatccaagaggtgctttggatcgcattgcttcgtgctagagttcggtggtcagcctgcgtgtgggacagtggtactccctccctgcttcttgattcgtctctgtggttgtgtttttagagccactgctttccccccttatcttcatctggtagagtgggtttgatgtggcttcctgcgagaaagatctcactctgatagtttgatgtcttcatgatctgtctgaggtttttcggcttgatttcggcagctgattaagcacccgcagataccactttttttttcttcgagtatccgctcttgttggactggatttctgaagtgctcgcagattgtctgtttatttatatcgtgttgcctccttgtttctgattattccaatcttctggacaattttttcccttccgtagagcgcgaaagatctcattttgatctgctaaacagctgcaattgtatcccaatttgcttcagtctccaccactggatatctcattggggggtttctccaagatttgcatctgcatagcgtttgtctcgatgctgttgtctgttctgcatttgctcctagtgtctggcatttctttgtctcttcatgctgctcccatgatctaggccaaaatttgacaactggcccatccaattgacatctttttatttattcctatacattggctggctttaattttcaggttaaactcttttgg

SEQ ID NO: 7619 - DNA, 869 bp, Zea mays
tctgatgcgtgcattgcaaatttgcaatcgctgtgctctccagtaatcttgcctgtagcgcaacgacctacaacagacgagccgttgaagatttgctaggctgacactggacgatcaacaagcagccgcattcaaggctcagcagtctcagtagcttctagtttgacttagtggatcatagtcatacgcttcgccagcctttataaaccgtcccttgaccctcttcctcacgtctgccctagccttgcgagaagcatatctgatcttcttgtcaaacctgtcgaccaaattcgtgaaaaggaaaaggtgaatcagcgacttctgcaaggaaaatacattattgaaactagaaacaagagacacagaaggttggagacatttttttttttttgccttaaaaagatagccacgatctatgaatgttaagcgcagaacaacctcaagcagacatttaaacgtgcttacattcttctcttcttcttctccttgtatcgtgtgagagcactatctctgcttcctccagctaatgagccttctggaccaggagaataccagggtggctcgcccatgaggagaattggtgacaccccacagtcttggtgatctccagcgctgctctcaccagtcaaaccagataagggatgggatatactagatctgacctgcctaacaggaatacaaaggctggaatcagcccctttcccctgggtttgacatcgcacaatcagctggtaccacatcgctacattggagctgcacaattttgggctgcttgaaaacaaaaaaaaatggcccagaattttaagtaagcaacaacattttgatctttttggggatataataatatttaatggagttttgtaaaaaaa

SEQ ID NO: 7620 - DNA, 769 bp, Zea mays
cttgcatgcctgcaggtggctcatcagggctccgtgcagcagcttcttgagccggtcgcactgatccacgctgtgccctgcccgttgcatctcaccaagctggcaccagagcctctcgacggcggtgtaggggaaccaaacggcggacatcttcttgcggtggaggacgtccactggcctctgcaaatggttcccagggatttgtatatgttataagcttgtaaaaatcttgcatttgggtatttcagtgttgtcaatccattaccgacgatgcgaacgactctagatactccaccagcaggttggtggcttctgcgtggcgtccgtagtttatgtacaatctgaataaagcagcaggatctgcctcttttccagacatgccccatgagatcttgttccctgccttattagcctgaatgcaaattgtagcagccaaaccaaaggtcggtcagcactaaaatatatagaattagccagagacactatttatgagaaaaccaccttgaacatctgaaccaaccaaagtggtagctcaatctcaggatcagtataaagaagcgtctcagcaacaatgactggcaacctaggatgcaggtctttgtatttatcctgcaaaaacaggaatagaagtattgacgcggcaatgtaagtagtttctgcaactcgctgttgggaacacaaaatatacattgcttgcttggatattaaaatatcctgcaactacagttttttaatactgtatttgtatggtaatgaaaccacagtttgt

SEQ ID NO: 7621 - DNA, 778 bp, Zea mays
aggtcagaaacgagccgcggccaacgaggggagcacgacagtcagacagctacgactaggactagtaggagggagactgggaggatagttctgttctgcaatggcctggcttggcttggctggctgatgccatgattgctcctgcgcaactttccggccgcccgcaggccgcaggcatcgcggcgccgcgcatcaaggtcagggtcgccgctgcctttccgtgccggccgaccaaagcgtttcatttctgccggtggcgtggtgtcgctctgtcgctgctgcctctacctccgaagcaaggaatcctagctagcagaggaaaaagcagagacacgctgcactgcggctccgtgctgtttgcttcgctttattccccttccttgttccagcaccagctctcctctcctctcccctgtcactctccatccggccatcccgccgcccaccctttcccccatccgccgaacccttcgcctgctgctgtgctgcgtccgtctggtccgaggcgtttccgttcctgacgccaagaacgagctcttctacgtacgcctgcacgctgaggtggtttctttgctcctgcctgccaccgtcgtcgattcttcttcttattcttttccccctggtccgtagccattgttggttggtgtcatatactttcatgcttcgtggactcctgctccttccatttcctctcttcccgaagccattgtggtccttttacctgttatatattgggagtaccatttaccatcttctagcttctacctctttttcccct

SEQ ID NO: 7622 - DNA, 749 bp, Zea mays
aggtgctgctcgttctgtggcgaacacatcactggaagccgccggaaccttgacgacgaagaagaaccgagctgatccaaatggccgcagtactgatgatcatcgtgcaaagtgccgttgatgccatggaccttgatgttctcctgctagtagcaaaccgatcgaaaaactaactgatcacacaaaggattatctagtagtacgtacttaactattggtgcacaaaagattatcatcatacttgcattggtgcagtaagtatcgaaatccggttatttatcaagtgctttttgtcggacactcggcaaacaaatctttaccgagcaccgcacgtggcaaagttctactcacagtaatgaccacgtttatctagagtaggacactcggcatagacagacactcatcaaatacctcttttgccgagtgtcaaacctcggctaacggcgacgctcgacaaaaggaccgtctctatagctgacagtcgttatctttgtcgagcgcccgggtgttatcactcggtaaagaaattgtttctggtagtgagtatgtagttagctaaaataacgtcagtaattaaaactccaaacgatgacgatgctgtaaactcgtcttcttcacacacagaacgcacttacgaaacgtatagcaagcaaatgctcgtacgtacggcctgattatttttctacgtcgtcctagatagcagtacgtgttgcaaacgcggacatggaagtgactcgtgcatgcgtcgt

SEQ ID NO: 7623 - DNA, 767 bp, Zea mays
ttgcatgcctgcaggtttccagaaaatatgtggtttgggaaggtaatcttgtcgatccattctgtagaatcaatatgtgttagcaaaaaaagagtacttggatgtgcgatgaacaacattcatcatgaagtgtgatttgatctgccagataatgtcttcttacttgacactaatgtactcaaatacaactattgtgggaactgtggcctgttgccagatggcaagtactgcacgtttatgatcagcttgccagggtttgggcagtagaattggtgttggtgttaactgattgtagtacagagtacacagatatttgcggtcagtgggtaagcacgtacctgtgttatgtgaggtctcgtgtgtgtgtgtgtgtgtacacatagctatgttcatttcttaacatactctcaaaaaactgttgtactctagcaactttcttccagtctgaacactgaacttggattctcaggccaaaaatctatgctaactctacataaaccttgatgccttctttaaaacttccaatttttcttggttagtgctaatcatgcctattgcatgactggccacaattcctagcgatttattcaatggtgttgtaacgtcttactgtttgaagtatctaaatcttgttttttttacatatttacaattcattcaagtatccttgttgcagattggcccattccaagcacataccgaagcttctaaagtcaaagtaaaaattcgcttgaatctacatggtttggtttcagtcgaaatctgcc

SEQ ID NO: 7624 - DNA, 825 bp, Zea mays
gagcaatctacttcaaaaataaactagccccatctcaaaagcaaaaaaatgcaaacacgataaaagtgacaaaaatttggggaaaaaataaattaaggcattaaattaccatcctcggtaatttcacttttgaagctggcatcatgattctgcactccaggagcgtattgatccaagaacaattggattgtcctccagtagcggtcccctccagacatccaggtatccatatgcataccactaggaaaatcaacaaatctgcaatttctgttatgatcagaagctttgtcatataacatcttcatgtgtggaggggggactagttcatcttgcaatccagaaaggaagagaatgggttgtttgacctgcgatgaacatgaactcaggcaaaggaatagcacacaccagtaagtcctcgaattaaagaacaaaaaaaagatgaagatgagcagatgcaacgttttgaggctctaaatacttagaaacctgtggttggatgctgaactatgtagcgattcaatctaggttggaacttataaatttcaaacacacgggccaaaggggaaaggagcgaacataaactaatacatgctaatatgctatccaaccttttgtaagaaatatgttacctacatcctaatgttcaactgcaaccaaaataataagaaaatggtaatcaaagcacaaaacagagacccagaaagttaattcaaaccaccaaaagctcacctctccaacaatatcaagtgtattccatggagagcgaacaacacagtttaaaagttttggacctttagaagagctcccgcctatgaaccatcttaa

SEQ ID NO: 7625 - DNA, 827 bp, Zea mays
gacctcgcagaggaggggcccgacggagctctgtttgttgcggggatcagaagatgattttgcacggcatgcatgggcggttctgacgccacatagcgccgagatgtgtgttactgctcacacgcttcgcggcacgcacgtcctgtctgaacgtgagcggcagggcccggggtggcctgctgctggtggtcacagattcagcgtatatatgcactgaatgtaacgacgtccagtgacgttagtgcccttcatgaacgaacatacccgaccctcccaccagagatctttttgagacgtgagctgtggtcgcattacaggctgttcttgtacagcactagtacaaagcttcataaccgttttctgggggggtctggattaaacaatctccgtaacagatgccctcaatttgtccaataacttagacaagcaatcccaataaaacagtggcgtgcgtgcgtgtcctttgatccaggccttgctaagcttaaccgggacaagcgaatccagggcaggtgctatgctacctagctagctaggcgacgcccatctcggttcttggaaaccagcacgcacatgtaccccgcgtttactcacccaacgtgcagggccgcgccacactgtgctgtccaattatgtgcaggccggcgaacgtagtggacgaaagcccgggcccgcagcgcctcatgctatactcatgcacgcaccaatcgcgcgcgccccaccgagggccggggcgccggcgaacagaaccccactaccgtgccagttgcaggaccataccactgggctcgcgacggacactgctggcgatctcggagttggcgcac

SEQ ID NO: 7626 - DNA, 712 bp, Zea mays
ctcatatttgatatacaaaatgacaatcaagagtttcagttgtgaatacttttaggtatgacaatgacatcctagcattgttctccacaccacaacctgcaccacttaaataactatatcgacttagagaaacaaatgtgtatacaaaaatatgcaagccagaaactaaccatagaatcatctccctcgccatcaatagaatctgctaaaagtgttagaatgttggccatatgcttttgtaaatacgatagctgatgagcttcttcatctgcttgtgaaggcataaaacggcgactattgctccgtacaaactgcaaaatgacataagcatatgtctataagtcgacaaataagaaataaaagttatgtgtctccaactctccatactggcaacagaatagatggtgcaacttgccatttaacaaaaaaaatgaggctgcattagcaattatgaaaaagaggagagtacagcactatcatgtttgcatagctcacatttcatggaagttctttgctatttggattggagaaaccattagtattggatatcatttggaagaaaaatataaagtataggcggtataacctttctgaaaacagacatgattacataatagatcatggtttttaaagcggtaaggcgagccaaggcgttggatcaccgcctggacgcctaggcgaggtaggcggacaaggcgcctaggcgtttgga

SEQ ID NO: 7627 - DNA, 823 bp, Zea mays
  unsure (1)..(823): unsure at all n locations
cttgcatgcctgcagagttgtttagttttaaacatatagttgtcttagtgggtgtttagtggcattgttttcaagactcctgtgtcatatagaatgaaatgaaacatggatgaaacaaacactcaatacatcataaagtttcattatatagtttcataaatatttaatttcatgattcatagagttgctaatcgtgtcaaaagagtttgatctccatgaaactcacttcttttatctattcttaaaactatttgcaacatggtcagaagtgcttatgtcacagcttattgaaaactctgatggaacttccactgaggctggcctaatatcattaatatgtgatgacattgtctggatgtttggatgacatgtttcaaattgcaggcaggatggtgtgatagtcaaggtactgtggatgacctaagatcaaagatgcatatgaggcatgagggtgcggtaaagagagaaagagcaattgcttatgctctttcccaccaggtatgaaatcatcttgcagcaatgatctggaataaaaaaacacttgttttttcttcttcatttctttttgtgctattttttgttttcacagcgaagttcaagccacagtggaagacccagctcccctgctgcatctctcaggaatcatggaactggcagaagcaataaagattggagccatttggatggggtcgatggcgacgaaaaccatgggagagccctcctgatgggagcagacccacaccgaacactcgaacaattcacggtgttcagaaagcatcgaggagatgaacgcagncagctcaaagctctcagatgccagctc

SEQ ID NO: 7628 - DNA, 824 bp, Zea mays
aactaatgcttggctaaaagaagcccaaacgtgacaggaaaagaagggggggctccgcggggaggctgcaactgcaactactaaaggcgtaagcacgctttgggggagagctttgtttgcacttgccaaagcagccgtagctcatccacaccagccaagccaccactgcgcctcaaagcaagcaaaaaaaaaaaaaaacaaacaaggaaagcacgcagcacgcacactaggcactcgcattgcacggccacagattcacatttcacagtgatccactcaaaaagcagacgcgacgcagctgcgactgcgagctcggctcgtggccaaacagaacacatggagcgtggatgaaaaagagtaaaagagtggaggagggaggccggggccggcagcggccactggccagcacgaacgaacagcaagacgagacggccatatgcctatccccacaaggattgtcttgcgttgtgccgtgcgtgcccgtgactgactgtaccggcccgtgtgtctcggcgagacggtgccggtgccgggcagcgtcagtgggagagcagagcaggagcagccagcccccttccaaagtgaaagccaagggcgctttagctgtttgcatgggcgagcacccgcatcatggtggccttgcacttgcgcgcaaaaaaggaaaaggcaccgccgctggtcgccctcggcttccctagaccgtggacgcctcgtcggctcttctactccgttcggggttttttttttgttgttggtgttctttaaggcccagccctggtgcgtgtgcaacggtgtctaaaacttgttcttgctccgttgctttc

SEQ ID NO: 7629 - DNA, 758 bp, Zea mays
atgtttgtcgactcatgcaagcgtctgaggatcatgaagagttctgaagccataggtcttggttagtgtctccagataaaattaccttccttccagagttccattgtaagatttttaatgcgtcaactctaaccgcctaagtttttcttcattgcaaaaaaaaaaaaaaaaatacagcaccaagaacgaaggacaagtgcaagaacaagagctgaagaagatgcagtgttaaagatgttgcccattgtatcaaaagaatggtccccttgcagtgcgctgccgttttttttttcctactagaaatataacgcgttttaattactactagttggagggagacctgtcttgttcaactcgttcatggaccagaagcaataatatatccgtgtgtagctggattggtgttatgtcatgtcccctaccgtgtctcccagaatctacttggtgattttattccagtgttgttaatcaagtttatgtgattgttaagtaaagggcatcaatgggactattattatttattattatggtacctgtatgtggtcaagtgggtggaacaggccatgtgccaggtgatgggggaatccattagtataactctagtctatttgagttattggctgggtcttgaggcatgatggcatgatcacaacatgaagcttccttgctccttctatagctgtgaccaaagccaagtacattgcataaacaaactaaaccatactttattcatcacacatttatgagtacgaaaatga

SEQ ID NO: 7630 - DNA, 785 bp, Zea mays
gtagaaagtttggtgcacacgctcaatcatctagtgccattagtgacacactcaaaaagcaagcaaaaatgtttatgaaaaaaatacttcgataatactaacttttctctgactcgtgtggctaaacatttaagagttgcatgcttacgatgagataataatgtgtgttcttggtgtagctattttacgcacaccagacacatgacttattctcacaatcactataggttttatccgagcagtcgagcaccgagctatttggtgtacgttagatgtccctcttcgtaaaacaagttattcagctctaacattaatgtgttcgatgctgacactggaaatcacatcggatatggaactcagataacatgaaaatcaagtatttcagctttaacaagcattgggcatgtctgggacatggaactcagataacatgaaaatcaagtatttcagctttaataagcattaggcatgtctagtgacatgtctaatgtaagcaccgaatgtctaacacataataactagttttgagccattgcaaatatgtccggtgcagactacgaatgtgcaccaaatatatctaatgcccttccccctatagtcctcgcataagggagtaagagttagatttctttggaatctataatctatactactctattaatttagtaacgtcagcgtccacactccgtagcccgctcgcgtgcctccgtcaccactgtggtccaacgcacacagtgccccctgcccacgctcgagcagttagccgcggctcccgctggatcctg

SEQ ID NO: 7631 - DNA, 772 bp, Zea mays
tgctgagagctttgtggttttgctatacacataatgtttctgactaccattgttttgttgcctacttgccttagatggatccaaaagccaaggctcagctgatagagagttgcgacctatactatgacatgtcttactctgttgcatattctacatttgctaatatctcgtctggtaattccttctgcatcatcttttttggttgactagctgaatgcagttagctttgccaaagagttaaatacatgagttgttcctgcactcgaaaagggatgtcaataatgtccacaaactctgaaaatgtatttttagatacttaacttgttaagtcagtaaaacctgtcagatacttgggttttgggtacgattaccatccttatgtgagtaaaactcgtcaagggatgtcaatgacgtgttgattgtgtattagatattctgtttgttcgaaagctaatctacacaaacagcttatgtaatgtaaaacctcaaacaaacttgcctcttcataagcttaggtttataggattagcgtttagtgcatgtaaggcctatttgcttcacggcctccctgccgagctcctggctagacagccatcctggccgtaggtgcccgaaatcgaacacctgggagccacgtttgcactggcaggttttcctgggtgcaaaccaaacacgcctatagtgttcaagtataactgaattggtgctcacctttgcctaatagcttaagtttttggttttcatcggtgcatgcaactccttactcaatagt

SEQ ID NO: 7632 - DNA, 819 bp, Zea mays
gatcctctatagtcgtcctgcagataagcttccaagagttcaagaacaagttactagaacctggtttagttgatcgcattgttgtttcaaataaatcagtagcgaaggtctacatcaggagttcacctcatccaaagagccaaggccaagatagtgatatccatattactaccactgatgctccaggcaagcctgctcccagcagatgcaagtattacttcaatattggtagtgttgatttgtttgaagagaagttagaggaagcccaggaagctttgggaatagatccacatgattttgtcccagtaacttatgttgctgaagtaaattggttccaagaagttatgaggtttgccccaacagcattgattattggtctattatatttcacgggaaaaaggatgcagagtggtttcaatattggaggtggtgctggcaaaggaagaggaggtattttcaacattggaaaagctacagtgatgaagatggacaagaactccaaaaataaggtttgttattacttttcttatgttactcaatgtttgacttggttctatatttgatggatgataaaaataatctggcccaacacccaaatgattttgtgcacaggctaattcttgacctctgatgactccaattgcttaattttgttgtagcttcatttgcccttttcttaagaaacaaagcatactacatgaaattcgaagatttgtcttttcatcaatgtctacttttctgctggtccaggtgttttttaaggatgtagccggttgtgacgaagcaaaacaagaaataatggagtttgtgcatttcctt

SEQ ID NO: 7633 - DNA, 744 bp, Zea mays
atcttgcatgcctgcaggtaatgaaatgttttaaggttccattctatccaaacttatctagttacaatgagaaaagggttctaaagatgaagaaagaagaaacagataaaaaaaggcacaaagccgtaccagcacatctgctcatcagaagttatctttactctgaggacatctgtctttggtcctatcaataatagcgtcagtgaatgctaaatttcagatgagaaaagcacaatagaagataagagagaaaggggagcaccagaagatcttgtttcaacacctatttcaaagcattggtcagaataaatccccttcagtactggaagaacataaaccaaaaggcaatgaagatatctcaacttatcaacagctgatatttcttgcaccctagcctttaaaaggttaaaaatgttacattttggacaagtaccacataaactcaaacatatgcataattaatggaagaaaactaatagagattgcatacctttattaagttgtctccttgtaagcaaactttgcaattacaaatgccacggcatgctggacaaacatttcgaacttcatccatcggaatgtcagagtacctgcattgcatttgcaggtaccttagtccaaacaataaaaggcacagtttccaaaatgtagttggaccattagcttgtactgcactatatttagaagtatcagaaaagagtttttttcgacagtttttagtcatgccttctcatgatcaatctt

SEQ ID NO: 7634 - DNA, 748 bp, Zea mays
aaaaaaaggtgatacgatgctgccagtacatatggatggagaaggagaccggccggctgccacagccacggtaacaacatgtcgttgggggcgccgagggggggaggtggaggcacgcaacgaaggcgtgaccccgtccccgtcatttaactagccacggcatggttagtgtcaatcacgcaggagatggttagattagggaagagacgctggttccctctttgtttatggcggcggcgacagtatagtagagcgcgcgcgcaactgcttccctccggcaaatcaacagctcattagggcgagcgcgggttggtgtgggtaatcttatcgttgagagacggagctagcggcctggtgatgctggggtttaaaattttcacgagttgggcatgacggttttcacgacatcgacgccgccagatcggttttgcattggccccgcccggagcttctctgctgtccactacgtactgggcaccatgaacttgcaaaagatgtgacctgctcaaagaaggcttagtgcatctccaccgtccacaccgacaggcccttcgtttgccgatccaccgtccacccgacatctcgccgccttcccgcagaaagaggagtaaaaaaacaaattgaaaaaacgccgcatagtggagccaaccagcgcgcgccatgctactcgctccgagaaaggcatgcgttctcactggacgcgtgtagcaacctggttgagcacttataaaaagctgcctgcagcacg

SEQ ID NO: 7635 - DNA, 777 bp, Zea mays
aagctgaaacacccgtagccatgcaaaggcatttctctattttttttaatgatttcaacagcggtaacatttcttggttctgcaactgcatgcaactcaggagtgcatagccaggtgagtagtatttacaacatgatgtgttcagtaaggggagttcagcaccaaagaacggcctaaatccaaaagtttactgaacgaacaagaaacaaaaaagaaaatcttatctataaaggtcaaagaggaatgcttttccgaaaatgtgaaatatatagatgtaagaattgaaagagtgcgttcaggatatatacatcaccaagttccatgtgcagagggcaaaaatcagggaaattttgaagagggaggcctggcatggtggacgagagccctctggctagccaagaagacctgccgatgcagccacattgcatcatccacgccgcaaaaactcaccttgtgcaaccgtcgccatggctgccggacggaactgccaacagagggcgtgcataggcaagtcattcttggctaccaaaaggggctctccatctccatgtgaggccgccctcctctttttcttcttaaccttcagccatgcctgcaagttctgtggcgtttggtgtctgtgtgtgtgtgtgtggcagcactggttgcatacgcctggtatttatggtgtggacaaggagaggggtcaggtattttgggtgagcagcttctgccatatcttgttcttcagtttcaaggattgaactagcaggctaaagcgtctcaaaatgttgaagt

SEQ ID NO: 7636 - DNA, 823 bp, Zea mays
cacatatggggttcttttatactcttggtaggctgcaagcttcctttgatttagcttagtacggagttgatcgagtgatctctcctgtcatgttgggtgcttttattcttgttcctttgctacattatcttgaaagttcctgggaggcagctgaggcatgcactattcctcaaatttgcagtttctgtgtcttccacatgtgttagttatgtatcctagatcaatgggtctttgttctctaaaccttttacttattttgtttgcaggaaccccagccgattgattgggagtactacagaaaaggaattggatcaaaagtggtggatatgtacaaagaggcttttgaaagtaagtatccttgtacgccaaacctaatttcaattatagaatctaaaaggcgcgttttctgtgaacatcaaggatattctaaagtgtttgttgtactctgttgattatcttttttgcaatgtgaaaagttttctggtctgttgattttcaagctactttctagtttctgtctaaagattcatactcatggatatcccatatatctctgattctcagataccaatgtgtttttggtctgagcatctggtataacaattgccccagtgtttgtaaaactatagagtactgttagatggacaagttattatatgtacccccattagtatttctattgaatacttgtgttgcaatatggtagcattttttttactacaagctatggaaatgtaaggctatgtatcataccttggtctattaaaaatacgttactctgtacacatacacctcagtttgttgcgatggatgccctacacta

SEQ ID NO: 7637 - DNA, 874 bp, Zea mays
aaatcctcttattcaggtagaaagaagctaagaacatatcacaatctttgtacgataaaagcggagatcctctatgatgaggtcaaacaaaacatgtttctacggaatcaagaaagcttgacacagtcgattctgtaggcattccacccaaaccccgtgcacatgctatggaaaccacccaattcagggcacaggaaaattattggttcttcacggacatggaaatggcatcataagagttctctccaatctcttcaatatccccagttatcgttacggatttcatcgtcaaacttcttcctgagttcagggtacttctcaaagtaatcatctgctgtcattgtactgatctttttctgtacacataaacaagatattaaagcgaaagggtacggtgtctttaaaaatgacgataaatgctaatgattctggaaatggaattatatgaacactgaagaatatcccctaccctcatttcctccatttcagcaagttccttctctatcctttctgactccttctgatgctctttctcagcctcctttaattcagcaatctacaggtaacataaatataagaaccaaaaagaagcacatcagcaataaggtaaggagttaatacgggaactaaaaaaattggatgcactcatctaggaaatgttggtagagcaactcaagatagaaaacacaaaaaacagaatagattttcaggcaataaacttaaaaatacaaaagtgtgagagcaacagctgctgaccacagcatcaaactttggcttgtactggggagtaactgtgtcgacgtacttcgggatctcgatgcctgcatttatttcaaggttactacctcagaaagtggacaaagagaacagaatt

SEQ ID NO: 7638 - DNA, 817 bp, Zea mays
ttgagatcaggaatcttgttattcccttgatctcctttccgacgtggccttggaagctgcgatggtcttgttggtgcaggtaacgatgaaaagtaccttaaaacaaaacataaacatttgtcatccatacaaggaagagaacgtaacagagtttccaatcagtcacattgttgcacctgtgttctagagcctgctgagcactgattcttgcttttggatcataggtaagcatttttgacagaagatccaaagcatcatcgctggccattggaaacaacgtacgtagtggaggtgcagcaacatattggtattcaacataatcaggaagataaaccatgtcaggccattgagaagattttggggtcccaagtgctgcgaaaatcttcccaagttgatcaatgtcactagaaccctgcaaaataacactttttgtgaatcaggcgtccttaatgaagccgcgtagctacaataatggatttgccacccactgactacaatagtgtttcctaatcccaatatctaagtacacggtacaccattcaacaagaaaacccaaatgatggttctttgtagtgcaactctacagtttagcaaaaaattaactgctgcgcatcagtaatgcttgcctaccgattttgttttcaattcaaatcagttaaatcattgttcaattttaatttcttgatgcaagaataaagagaaacaaaagcctataaaccaaacccaggagtgcaactcgattggtgagaccgtgagaggcatgctttcatgcccatacttgaaggtcgctggttctattaaaccctccttgaaacat

SEQ ID NO: 7639 - DNA, 777 bp, Zea mays
agcaacattctactgcttagtttgcaatactttcaaacttttatccttttaaactaccaaattgacgtatcaacaatgctcttcttacctccttgactgaatccacaaacaaatatgttctcagggtggatgccatcggctacttccctgtctatcatggcgtgcaccttttcgacagccttgagaaccccagtctcatcttgcggagagccctactcgttcaaaatcgcagctacatcaaaattccagtgccttggtctatttgattgctaatgttatggagtgaactcacagcgctcatgggaagctcgtggatatcgaaccacgacggcatgacaaaaccatctgtccggggggaaagactctccttatcagcaaacgttgatttgaagcaattgtacatacagggggttaaagaagagtatatggtggaggaagctcactgttgcatgatacgggggcgcggggagcggaggggaacgaccacttggcgagccggaactccggggcggagaagaggttgcggatgggctcgttggcagggcctgagtcgccgaggccgtgcagccacagcacgaaactccggttgcgtcctgccatgtgggaggaggggacgagcttggcgggaagcccgggaggcggcgcgcggcggccgagtgaggccactaggagccagggccgctcccatggccccggcgagggtgaagagcaagccgaacacgctactcattggccagggcccatcccgccccaaaatgcctggccagaacttgtagt

SEQ ID NO: 7640 - DNA, 799 bp, Zea mays
tatgcttatgttttcagaactgcatcttgttgactcttgttacctaaatacgaactcttgtttcagacaccggtgttatggtttcatgggatggcagatggggtggtcctatttgaagcaggacatgctgggtgtgcatttttagaggagcttggcatgtcctgtgaattcaaggtaatagaggaagctgtagtcaatgctcacttttaaaacattttgcctccctcccaacaagtggctctgcaaacatttgagctcgttttcaaacacgcctgacttcagctatatgtctgttttcccaattgattttttgaccagttttcccaatcatctactcaggcttatcctacccttggacattcattggttgacgaagagcttcagtactttcagcaatggatcctgattcgtctagggatggctgcatctggagcggctgaaaccgcaaggccatcatcgtcatctaaccacaacgaccatctccaatagctgttttttttgtcattgcttagtttctagtacaattcattgctgctatctttgcgtggcacatcagttctcgttgtgacgaacataaacatctttcttaatctccttcacattatttttttataatagcagtaattgacttaacattattcaactaaggaattgaaagcctcacgagttctaacgtgatccgagaaggtttatgataataacagtagttgacttccatcgtgattcgtgtccgtgaatttgattcgttccttctgaaacaaaaagatcctgaattaacactcaattttcggaaatcaca

SEQ ID NO: 7641 - DNA, 877 bp, Zea mays
gcgacaaggccgaggtccagatggagctccgccagttccgccgcttcgccgacgagaagatggcgctcgacgccgcggacatcgaccagctgcgcgcgctcctcgcccagcgcgcgcgccgcctggtgcgcctccgcgccaggctccgcgagtacaggcgccagttcctccacctcggcatcccgctccccgagggcgaggacctcctgttcgcccagaccgccgccgaggaggaagaggacctactcctcctcgagggcgaggacggctacgccgatgccgatggcgatggtgatggagggtactaccctcagctccgctgcaacgacggggagtactactacgaggacgaggaggaagaagatgcggttgccctcgatctggagcgccggatctgccgcctcgagcacgatcaggaaactcccctgcttgagccaccccttcaggaagacgaagaggaaggcacccacctctacacagaagaggcgttgccggacttgtctgggcatgagcagggtggcctctatgctgatgacatgttatctgtggacggtgtggaagaactgagcgacctccacaatgacgatgaagagctgccagagtctcctactgctggacatgatgatagggtggaagcaagcgaggctgatggtgttgacagtggcagtgatagggtatacaccattgacaaggtgcatcaaggtgagtctgcgcctattgcaagggtcatggataagtaccagggtgaggcgggtggagccggacattaagaacttttacatgaggctggaggcacttgaagctgatagggagtccaagaggcacgcccctgggggcaatgcgcaccagagaaagcacaactctgttctttttttgg

SEQ ID NO: 7642 - DNA, 776 bp, Zea mays
  unsure (1)..(776): unsure at all n locations
catctgttatgctcaacaagccaaatgaagaatctacattttccaggagcccaagtattccacaccctcctagccggttcaaaatccactgacccaaagaacatagcacgataggccgagctagcataagatccggaggtgttaaacctccatgtgtgcttatcttgtaccccatgatgaagaactatattagagagtgattcgcattgatccaagaattctgccaacactgttacaatgagagcaccttttaaatcagcgacccactgaaaattgggtagggcctcactaaccaaccttttactaactagtcgggtaggcaccaactgaaacaatgaagggccacatctttaacacacttgccttacagaaaccgatctttccaaaatagggtgttagaaccatccccaatttgagtaaggactgccacactaaacagatttcgaacctccttacaagcctgaataggataatcagtccatggcttgctcaagtcgctttttggagccacaaccagcaaactctcaaagcctagccatgaaatcgaaggtcaatcaagcctaaactgcataggttttttggccgagtcaccttaggtcaagctagaaggcaatgtcctcctctggcatttttttctttctttccacaagaaccctcttcgaagcttgtcaatagctttgatggcccacgtaggaaggtctagagcggtagctgcataaatcagttttgatgtgatcacaaacttgacatgaatagacccnccaaccccttgacat

SEQ ID NO: 7643 - DNA, 897 bp, Zea mays
cgcacatgagcaagaacgtccacgccggcatggggaccaggtgtccaggtacacacatccgtcgtataccccgcccacgcggagcagccggacacggcgccgcgcccgtgctgatctggactagcttcacgttcgtggtcacgaaccccacccatgcggagcaggcggacacaccttcaaagaaagacagacaccgaatagaaacaaaacagaggtacagattagagatgcatcaaacatgtacccaaaaacctactctccctgttgatgggcctaagtgaaacaaaggcaaaagacttcatggtgcaatgatgcatttaattttattaaataattcgccctcctttttactaaacaaccattactgaacaagcacgtcttctacttctggtccaatgtattagtccttatcaccttatcaaacacattcatctaccaggactaccacattctatgcatgactgttggtgttcctcctttgtatttcataattcctataccccgagggccagatgaaattgttcgacaaaagagcaagacccatggtatgtttgttcttcacaggcatacagataatttaaccaatctcatttgcgcttcgtttcactagcaccatccactgtagcaatcgggacccagccacaccttaacgtctggtcttgcaatcaacactcctgctaaacaagatttgctcgcttcaggatcaatctgcctcccctacttcagcgcttgctgggactgtccccagaatctttgatctcaactgcatcaacaacctacccaagtaatttagggcttctccctccctcccaccgccccaaaaaaaatggggaggcgatgcctcaacgagaacagacccagcagttgacagcaacatattagtcaggaggggataag

SEQ ID NO: 7644 - DNA, 841 bp, Zea mays
  unsure (1)..(841): unsure at all n locations
agaagagcacaaccttatcatgggaataggacaatccagagctttgtttggggctacataagtaaattgtcgatgccaatagaggtagattagctcggaaaagtacaatataacctttaatatgtaagaagctgaaagatacctgccaatccatatggtaaacactctgaccaagtttcatccttgcactgcaaatggcttctcagaaagcaatgtgctaaatgaattcaaaatcacatcaatcatgtgagcaagaaacagaaggtatattgcaaaattccatgcacataatgtagcttagactgtaaaagataggaaaccattcaagaaaattttctagagtcagtttaccagaatggattaattatgataatattatgatacaataatgatgccaaactgagcagaggaaaaatgtggttcaacaaaaaataatgtattcgttttgagttgaaactataaattaaggaagaagtcaattcaagactcaaaaaatttcaaggaaaacttcgtatgtgattattggattgccaacagtagggctgctatctgctagctcttgtggtcaggcgttgggagtgcttttgggtggtctcgcctactacaacctcatgcatgcctctgaatcatgctgtgaacagatgcagtgtgtgaacagatgagaatagaagcagtgtgagtactacagcctactaatgtatctttaagacagaaacatataatctgcaatgccaccagtaagtaattaagctaaatatgtaccatttaagtagcagttcacctacttcgcatgcacaagtntcacagaaaaggaaacacccagctaggagccctaagcaaa

SEQ ID NO: 7645 - DNA, 910 bp, Zea mays
tcatagaggtccttcctcctctgagcaattgttgtttccatgaactctttatgttcagccatggaatcaagaagctccagcagctccttagcagctgcctgagtttcttcttcaactttaagtgttacatcttggagcctcttctccgatttctaccaaatcaaatttcgtttgaattatcttactccaatgtgctaaactaataaaggaatgtgttttaagtattaacaaaacaagaggtaagaagtaccttaagaaaatcatctgcctgcttttcagcagaaatcaaactattcttctttttctccaactcatctttcatttgtgcagcttcagatgtgaatcttgagtcatcatttataatttcacgatccagtaaattcaaacgagcaacgatctagacaacagcagataaagagattcaactttattattttgcaatgattactgtcatccagataagcttgaactgtatggtaggtaaaagccaggaccaagcacttgtgcatatcgataattgtttagactctagaatcaccatgaaaagagtgggataagaaatttatgaacacccaaaaaaggatgcaaacccgaataacataatagattaaatggtcctacatagaagggaaataatccaatttcaaatatctgacaactgttccaacacttgactgatcggcatattctttgttttattgtgactctaaatttgatattgacttcaagatactcatcaactccaccacattcatagaagtccctaattcacatgaaggtgggaccgacccacttactccctctgtctaaattatagttcacttcgggcgtggccaggtactcttatatacaatttctccattattatgaatgagtttttagaaacctccttaacctctaccaaatcaaa

SEQ ID NO: 7646 - DNA, 775 bp, Zea mays
aattttttgcgcattttcaccgaaggaggcttgcaggttatattaactttcctaacatctacaattggaaccttctaaatttatctagttttattcctgtctggaacataatgaagatctttttgcttggaggaagctgcctccattttagttcccacatacaaatgaactatgttattaatttcatgttcacagcttcctacatgtgctccctaggtctgaaatttttaaggtattaaattgttgacaacattttgctttgtaccactcttcattctctctcaaagtccacaaccataaggactgggtggtattcgatgttctgtttttcgttgaagactgtaaaggatatacgacagctgtagactcttgtagagagatcttttagtttagcagatattgtctatgtgaggtggcaaatggtaatagttgtctaaaatagtggaaaagagaagtccaatcagttaatgagtttgagcaaaaaaattgtataagatatgatagaatccaaggtcaagttgaggtccatgtactaatagtaggatttagccttatagattatcttaagatgtgtaaaaagatccgactcaagtaattggagaaaatacattttcccattatgtccaggttgcccatccacccctttattttccattttttctaccttgtccacttcccacaattcttcttaattttgcacaagccaatgtgtaaatccttgaacttcctggaaatttttatttaccaaataacaaaaagccaatgggttatcttc

SEQ ID NO: 7647 - DNA, 748 bp, Zea mays
atcttgcatgcctgcagctgttcagactactgactactgttgtaatctatagagataaaataatataaaagcagcagtcgtagtcggattaaaaccactacataagagaaatcatgtaaagttacacatcctctccaatatatgaatgtgcatgcgaaagaggcaacagagaataaaaattattttttaaattgatactccctccattattttatatttgtcgcgttttagttcaaaaataaactaagaaacgataaatatgtattatttaggtgagagatgcatttacatatacgtgatttgtttgagaaacaaaattcacaagtgtacacggttcactaccaaatagctaaatgcctctcgaaatgtgcgttttttttaaagatagcctaggcatgtagcaactaattttctggttggagatagcctaggcatagcaaaacgaacgcctggcagctgcctgccagccaaccaacgggcaacgcatcgtggccacatagatagatttaaaattatcaatgatagtaatttctttgttctaaattataagtcgctttatgttttctagtctagatttagtcagtgtacgcctaatgcatagcaataactatgtactaataaaacagctaactgaaacattttatttatataacagaaaagggatacggtcacaacacttgaaatgacgaacgccgattttacggttaaagagcagctgatgaaggaaaaatggacaaagactgctttc

SEQ ID NO: 7648 - DNA, 806 bp, Zea mays
gtagacttgtagtccagggtatattaagagcgcacaaaagatgggtatttattgcaaaaattggcaatggcgccttaacacacaaagttcatgtatgcatcagtcattctttgtaaaacttcagtggcagcagtcatggaacaaactattgaacaaaaagacacctaatagcacagatacatacgagaatcttgaactaccacaaagaaatcttcaaacttctccaagaacagcgtttccctactgtccgctcatcaagcttgcaagttgacccaaaggggcgaaattctccgcaaagctaatcgcacttcgatgcctttcacccaacccatgttgccacttaccactaaccgcaaaagtaagtctgaaatacctcaccttcgggtcaacgccggagccggcggccacgcgcagcggccgcagctcggcattggggcgccggagggagacgaaagcgggagtcggcctgctgggccgccagcaagcagacagcacggcagcccgagttaggttctggggtcggcagccggcggagctagggtttactgccgcggatgcggcgggtccagcgcagaaggttgccgccatgctgccctatctatcgccctccactccactgtccggaaaataccaaaaaagaaaaaaaaatgaataaagaggaaaggggtaatgccgtgcggcattgacgcctctggaagtctgcatgccagccgtttgcgggcgggccatgccggccgttggatcacggggcgggatccgattcatcattccacagaatatagaccccagaccgtcacgggcgggcc

SEQ ID NO: 7649 - DNA, 930 bp, Zea mays
gcaatgactgtgtgaaggtgttccctttcttctcttaatttcaccagctcttgttgcagatccagcaccttcatttcttggctctgcaaactctcttcaaaagattgcttttccttcaagttctcttcaagtttagcttcatattttgcagctagctgttcaattttcttcttttcttcagttatttggctcaatgactccataagctccttctctttctcgcttgctgcttccaccacagcttcaagactagctgcttttgtctgataagcttctagatcatcagagagctgcgaagccttgcttctgtactgctcaagttcttcttcaacccccttgagcttttcatatgtgctgttcagctcctgctccagctcctgtgtccgagagtatgcaccttcagcatgagtctttgatgtgtgaagcagatcttccagctccagacttctttgctgaactgaatgtgcttgttcttgatgctctgaacatttatcagtcagctccttaacttcttgttcaagtagctggtttttagacatcgaggaatctagggaggattgtagctcgttaattttttctttgtatccctctgcactggtcattgtttcttcaagctgcattcctctttctgctgatacagcagcttcttgttgaatacgctctttcagcaactctatttcttcacttgatgcaactaatttattctcaatctcactgagctgttgctcgaggtctgagcctttcttctcagcagctttgacacttgcctcagcttcttttagctctaggttgagtgcctcttcagctgcacgcattgcctgtatttgtgcttcaagctcaataatcttctgacttgcattttctccaaaagctttggattcaccatgctgctcattgagagagttcagattcagctccaactcttctttt

SEQ ID NO: 7650 - DNA, 781 bp, Zea mays
ttaggacttgaaaccaaatatccctagcaaaaacacaggaaaccaaaatgtgctggactgtttcttcctgctgatcacatagagggcaactttcctggtgatcgaggccccgacgagctagtgtatcagcagtccaacatctatttagtgaggtcaaccaaacaaagaatttacatcgcggaggagcccaacttttccatatcctttcagctggctcaaacaaagttgatccagctagaaaccgtttgtatgctgatttggcggagtattcccctgaggatgtaggtagccatatgtgcatatcagggacccctggatgaagttgtaccccctgaatcaaatcccaaatcttaaagtactcggatagaacttgctccggcagacttacaatgatatcattcacccatctgttttcaatcaaagcttcaatataatgatgcataagttgtcctgcgtgttcgagaaaaaaatgtgatttgagttcgtgaggtccctgttgttgtttgagatcctgtaaggttactgtacttggctattgtggcccttcctctctctctcttaatgcaaccatgcacagatctcctgtgtttttgagaaaaaaactgtccagtgttgactttgctactgtctattcatggtttcaggatactggctaattcaaagccttgtcccaaatgcaaacggcctattgaaaaaaatcagggatgcatgcacatcacatgcactccaccatgcaaatttgagttctgctggtaagcattcttactttatgcatttattc

SEQ ID NO: 7651 - DNA, 1099 bp, Zea mays
tgctgagggcagccgatagctgagctcattaatggagtgtttggtttgaggaatgatatagtccatcatcttctcacttctcacttttttgtttggtttgtggaatgaagtgagttaatccatcaccacctcattctcatagttagttgtttagtattaatatgtggaatagagtcatcccactaaatttgatgaatggacccatgatgcaccccttcattttggataaagtgattcattaaaccaaacacttcataagtttttactttgatcttattcacacgtacatatctcacagactaatgatcatggatactccaatttatagttaggctccaatttataattagattctgtcagtgcgaccttagtttaaatgtcatgtgtcgcttagccgagaagatcagttttgtgtatggaactgcaagagtccacgactgtttaccagctttcgaccagacgaaatgtacctgtacttctacgcacgatcccagtaaagcactgcgtttaatctgatttgttcctattttattttataattggaggcatttaaatgtgttcattaacttagattctctggtttggaaattggtgagtacagtttgatagcttactaaaaatttctctaaaatttactgttttggaaaatctgagtacccatgccacgtgtacaatgacgcatctagacattcaaagcccacgtgtagctagaaagataaacctttggtttctttatattatactaccaaacagccagaacccaaattggccaggccaggcacccataccggaaggtccagcccccaatttgattaaatctttccccatattaccagcgccctgaacgaacctaagtttttcttggaaaagtttgccagaacctttaacccctggcttaattttgggaaatatctggaaggaatttggatccccagaacataatttgcaggttccaaatgccaaagggaaaactttggatacccaacgggtttaactctctgtttaaaaggggaaaaatgtcggggcacttaaatgccataaaactaccgttttgggttccccccggttacccacttaaggcccaggttttgtttaaaac

SEQ ID NO: 7652 - DNA, 840 bp, Zea mays
tacctgtaggagctggaatgctgctgtgaagtattacagaaacatgtgtagattcattgatctgtcttctgttggccctctttgcactgattctgtgttttgtgatattatggtatgtgtcttgcctatctgtttgatctcttgagaaattacttctgtcatctcctaacgttgaacccaaaatcactcctctttctttcaggctggttatgagaagcaaaatattaggacccttattttagctggttgttcgaatcttagttcgcatgcccttggcagagtacttgagcagcttccacaaatatcttatgttgacatccatggttgcggtcatctaggggatctgaaaaataaatttcagcatgtaaaatggatcaggagctcattgaatccagaggagtcatatcggaaaattaaaaccttgaagcagataggtgatgggaacaactacgcatccaaagttgcaaggaacttcaccaatcatctggatggttctgatgagcttgatgggtattttgctgatatttcaaatagagagaatgctaacctttcatttggacaaggtttctataaacgatcaaaattgcttgatgctagaaagtcctctgcggttttgtcgagggatgcagaaatgaggcggttgatgcagagacaggcagagaccagttacagaaagatggaagagttcatcataaacagactgagagaaattatgaggagcaacagatttgattttttcattccaaaagtcccatcactatttgataattatttggatgagtccccttgatggtctaatatgatgtactaatactttacgcccatatccggttcatttta

SEQ ID NO: 7653 - DNA, 825 bp, Zea mays
gctagcttgcatgcctgcagctctttgtcaggcaagggaggaacagcagttgtgggaaatggcaggagctaagggtctctcctttcttgccgcaaccatcaggggcacctagctgcctggtttatcgctgatgggctggttttgtttatcaggagttgtttgtttttgttttttctcttcttttctttggtttctttatcccctctagggaggtcttttgtactttggtctattttggaccctcttttccttctacttactataatgatgcgcagctctcctgcgctttcgaaaaaaaaaactatgtatggcatccacacacacacacacacacataatgggtatgaggtattcccataattccctacatggtatcaagcagtgattacatatcgtccgactaatcgcgattagtcacgattagtcggcctgatcggttgttagtgctcgataagaggtagcgattcgaacagggtaactgaacgtccttatcgtccgcctaatcgcgatatatagcgattaatcgccgtgttgggcaatcagccgataagcgcagcagactggcagtccaaaagccattttaggcttaaatgctgtctggggagtccaaaggatgcccagtcagccagtcccttcagatgcggcctgggtagaccaaaagtcgcccagtccaaaggacgacagcttatctgtcattaacagcagctgagtagcctatcttctacctccagtcctccattctcttctcctgttcttcactcttctcccgtcgcctatctgtcaacaacagcagcacttcaaagatgagcagctcttctggaggta

SEQ ID NO: 7654 - DNA, 847 bp, Zea mays
agcttgcatgcctgcagaacgtgcgcgccgaggaggagcgcgggatgcggccgctgtcggagctggccgagggcctgggcatgcgctacgtgttcgccgagagctgggcgccccagtacggcaacgccgtgctctcccgctggcccatcaagcgctggaaggcgcaccgcgtcgccgaccagtcggacttccggtcagtccacctctcccctcccctcccttcccctcccccatcatcactgcctaccaacccgcccctagctggctagctgctcctgctgcgtgccgtgtgcgcctcgaaggggttcattcagcgctaatggaatgaattccatttacgccacgcaacaaacttaaccaacttatcaccgggatagtaatgaccgcagcatccgttgaatctcccgtacggaacaacaggatatagagcagcaacatgggattcagttgtcctgtgacggcctgaatcgaccgcagcccccgtgacacatcacatgccagagccggcgcgaggagcatgcaatcccagaccctaccctgacagtgtctccaactcgtcgtcgtcggcgctgcctgcctctgactgccgccactcagagatactctgctcagacatggcagctgtgaccgattcatcagcgtcagcattttactggttctcctggggccctggcgggccttctctctctctctctctctacaattctattaaataaataatcaaatgtttcttctttctacaatggggcgagagagagagagagaaagagctgacgaccaaatgaagtaggactgatgcatgtcgtcacctagccagcaggcagcctgggcctggcgaacccaaagt

SEQ ID NO: 7655 - DNA, 785 bp, Zea mays
atcttgcatgcctgcagtccagcgagcgcgcggccccgggccggctccctctctccctccctccggtggttgaggggggatgcgcgcgagggtgccgacctcagctcgcttttctatctgtttatctataatcttccttcctttctctagttgggcgggcagtatctttttctctctcctttgcttttctgtttctaattacgtatatataaggacaaccgaaccgaaccgaagaagcgcggggcggggcggggcggcgcggaggagagacggcgatcgtcccctccctccattattcccctatcgatctcttgattgcctcgatgctcgctagtggagtaactcgaccgatcgccattgccggtggtgggtcaggaccagaagggcgcgcggtgtggggtccccttccgccgccgtccgtgcggccgcgcccccgggccgttcttgctcccgccggcctccgtcgtctcgtcattgccactggctgcgccgccgccgccgccgcctccgtccgcggaactagccgcgtggccgttgctcctcttggtgtccaccagctgcgcgaatttttaaaaaaaaaagccataaaaaggcgctagtgaggtgtaaggaaggcggcgaattaagcgtgactgaacagaaccgaacccaatggacgccaattccttggcattgccgttcgtttcacccccatggccatggcattatatttctttatttatttatgtcaaagacaagaaagcaaacaaagattcatgaagaaaggcgcaaacttttggtgttct

SEQ ID NO: 7656 - DNA, 799 bp, Zea mays
gcatgcctgcagtttagggtgacaaaaacaattctaatatcaataggaggtggcttgataatttcagaaatcttatcaatgaattggagctcaaagttgtcaccttgaagggaaggaaatttacctggtcaagccagagggaaaatcctactcttgttaaatcagatcatgttttttgttcagctagttgggaggatctgtttcctgaccatgttctgtccagttctgcttcagaatcctctgaccactgcccgctaattctcaagttgcatgaggatttcaagggaaagtgcagattccattatgaaagcttttgggagaaattgcccggtttcttagaggaagtggcagcctcctggattcaacctactcctccagtatgtcctttgaagagattctccctaaagctaagacgtttggccagaaagttagtcatggggacagaggaaggttggcagtgtcagaacccaattggggctggcaagagaggttttacataggctggaaatggctcaggacagcaggctgttgtcaggagatgagtcttggctgctgcgaaaactgagacagcactccttggttctcgcttccttggaaagaaccattgctcgattaagatcccaagtccattatttgaaggagggtgatgccaacacgtctttctttcatatgcaagctctctatcgtagtaagaagaacctcatatctaatcttctggttggggatcagttggtctcctctcatgttcaaatggaggaggaattacatgggtactattcaaacctttgtgtttctgagt

SEQ ID NO: 7657 - DNA, 873 bp, Zea mays
acggagtacaagtttcagctatacataataagaagcatagatctagctcaccttcataaactcctcaaaagagaaccctttagccaaatcaacacgtgttactctgtcctgccactgtgccagcaaaattggatgatgaagtctgcacagcaagcagcaaacaaatctgtgtgagcctcacaacattgtagtgagaaaatctatatatgtacttctattcctcttatgaaatcttaataagtacttcctccattccaaattataagacattttgttttttctagatacattcctttcactttgtatctagacataatgtatatctaagtgcataacaactgctatgtatttatagaagccaaaaaatcttataatttggtacggagggagtaataattatattgatttccaggatggatccatacaaactcgaatagtcttattttgggctctaaaaaaatcaaaagaatgaagtgcattttcatcaattagactagagagattgctccaggtggcttaacctgttgcatattcatttttatttgccagtgatcaaggtgaagggaaacatctacctgacatcatctaatgtacgccctgttttcattgtgtagctctggcgtggacgcagtagattcaagtctgaatctgtttcggttgaagaggttaaaagggaaaactcatccttatttccagaagcagacccatagctcaaaatcacagatacatgaatacgcgaagcaatagctgaaccaacaggcgcagattccaagactgcaccaactaatttgtcgagccgattgatatctgtcttcattcctaactttcctaacttgctgcttgggttctccatggcaacatgcatgaagacta

SEQ ID NO: 7658 - DNA, 823 bp, Zea mays
cttgcatgcctgcagcataccaacaacagataatagtaagtagctctaatcacagcatcagtgtgattggatggaagaaagcaagacgtccacaaggaatatcaataccttaatgccaatgccacgtgagatcctgtgggtggctttaccagtagttgtgtctgcctccttgctttcttccagtgtaatctagagcattcacaaataattaccactataaccttggaccctacatataagcaaaaaaggacagacccagtgcgggaggctcccacatgagtactcaatgagacaactctcaccacttcaccaggcctgcccttcaccctacaaatatgcaaaaaaaagggggagacccagtgccaaagcttccacgtgtggggtctggggaagggataaactgcggcagatgaagaaaaacattcatgagatgatgatatatacttactccgtttgcaccagtcttcctagtcgttgaagatgtataacaggctccatttggaccaccatatgtaacagttgaactctgaaacataaatgtctgaggctgtagacgtgatgtaccagatctgctgagctccctcccaaattgtctatgtttaggtcttttattatctgcaaaatagtatgtatgcattagtagcctccacttgtaatgcgaatcctttacagcatacactaagggaatattataaaagatactctgctaaacataataaactagtagttcaacttcaacgtaacatgccacctacaaggctaaaaaccaattgagtaggctttctagaaatacaatgagatgagatcatactgaagctatgtg

SEQ ID NO: 7659 - DNA, 873 bp, Zea mays
atatgattttgtcattttgtagagctaatattatttctgtgaatgagttttgggtgtcatgtttgatcatctaattgatgaaggtttgctcttgggaaaaatgtgtctgggctccacttgatcatgtgatgttgcagtttcagttattacattattgtttactgtttatttacatatggaccatgctaccacatgtccatatgaattgatgattttgaactggggctcaggctggagttatgtgaccgtatagtgttatctacacgatgcacaattatttaatacatattgcctgtattttgatttttgaaccaggcaaggtgctgtaacataagatgcaagggggaagaggtgggaggcagggtttgttcggttttggggacccttttgttggtttcggcagctttggacagccagggaacataatgtccggtttctttggtggcgcaaatccctttgatgaccctttcttcacaaacccctttggtggcatgatgcaacctagtttctcaacccctttcagcggcatgatgcaacctagcttcatgaacccctttggtagcatgatgcaacctagcttgcttggatcaagtatgtttgcatcccatggcaatctcaatggaggcacttttggaagccagacacatctcaatcaaggcatgagcaatgccagtggtttcattcagcaagcctctgaatcgagcaggccctaaagggccaattatcaaggagttgtcttcagatgaccaggataaacccgaggatgataaagaagatggcaagaagaatggcaactttagaagcttcccaaggaaagcagaaaaccgtgtgtggaggacccagataagaaaaaaaagaaagtcagttcatttt

SEQ ID NO: 7660 - DNA, 712 bp, Zea mays
tttctggccgtatcgaccgtcgcgccttctcccgcggctgactgacccgtgaccgatgtgctcggttggcactgtcgggtcatgcgcagggtcgcctcgagtcgcggcactggttccgcagtcgagaaggcgcggtactggcgtgagtggcggtgcagtttctcgcacgtagtaaccggcgcgccggttacatgacgtgtgggcctgggcctccatgctggatgcgtcgaagtcgaaagggtgcgccccccttggtgcggttgcatgccgcctgcatggcggtccgccctttcacccgctggtctaggtgaaagtggaggaatgcttgtaaccgctgggcagttacgcgcaccgcgcgcggcggttttggcttcttctgtcctgggccagtttgcatgacgcgtgggacccagcccccgtgtcgtagggggaggaccttggagcgtgttggagaagactcggtccgcgacggctgaggacgcaagtggggagagttgcctttaaaaggagggtgacccccttggaaggcaaccatgtcttcgcactcccttcatgcatcacgtccttccaccttccgagcccccggatgggggacacccgcggttcttccgccttgtcgtcgttggaggaacgcaacttcgcggaagttggtacctttcagccatcgttcggcttcaaggattttcatcaggcagcccggccgcattccctc

SEQ ID NO: 7661 - DNA, 1329 bp, Zea mays
aggcttctgctgaccaactcctgaagctggacgaacttcttgagctatactctgtgaagaaaaacgttggggaggccataacaacgctgaagatatgtgtggaggtgttcagcttgtgcatgacatgcaacaatttcattgccgaagctaagttccatcctgcacttaagacactggacctgatccagaaaggctacctgcgaaacattcctttgaagcttgttaagaaggtggtggcgaggcagatcccactgataaagctgcacatagagaagaaagtctgtagcgagttcaacgattggctcgtccatataagaagaatggccaagcagattgggcaggcctccataagccaggcgtcgtcggctcgccaaaagggcgaggagatgcgtgcccggcagagggaagccgaagggcatagccatgctggaccagatgagcatctgtatgccttggacctggagaacacggaagaggaatcggcgctacattttgatctcacaccggtttatcgggcgcaccacatgcacacatgtcttgggatggaggacaagttcagagactattactacaagaacaggctcatgcaactcaacttggacatgcagatctccacttcgcagcccttcttggagtcccatcaacccttccttgcccaggtagctgggttctttatagtcgaagaacgtgttcttcgaaccgcagatggattgctgttggagagtcaggtggaaacaacatgggagacatctattggtaagataacgtctatactggaggaacagttctctcgcatgcgtaagccagccacttccttctcataaaagactatgtcactcttctaggcgcagctgtgaacaagtacggctatcgaatcacacagctgattgaagttctggagaagagtagggacaaataccaccagctgctgcttctggaagaggtgaactggatagcggaggaagcccccgacaacgcgaacgactacatgaacgaggtcctgatctaccttgaaacgttggtgtcgacggcgctcctgaacgacgacgtgaagaggttcaccgtcaacgcggtgttagggatcgatattgacctgaagacgctggaagcgtttgcggacgacaagttcgacagcacggggctgtcagatctggggaaggaaacgactttcagggactgtttggttgagatcaggcagctcacgaatctcctgctcagcagccagcctgagaacttcatgaacccggtgatcaggcagagaaactacgagtctctggactacaagaagctggccatcatttgtgaaaagtacaaggactctgcaggcag

SEQ ID NO: 7662 - DNA, 801 bp, Zea mays
cttgtacttctcacaaatgatggccagcttcttgtagtccagagacccgtagttcctctgcctgatcaccgggttcatgaagttctcaggctggctgctgagcaggagattcgtgagctgcctgatctcaaccaaacagtccctgaaagtcgtctccttgcccagatctgacagccccgtgctgtcgaacttgtcgtccgcgaatgcttccagcgtcttcaggtcaatatcgatccctaagaccgcgttgacggtgaacctcttcacgccgtcgttcaggagcgtggtcattatggagtccgagatgtggctcatggcaccagaaaccaccttgtacagagcttccagaggcaggatctcctgcgccgtcgacaccagcgtttcgaggtagatcaggacctcgttcatgtagtcgttcgcgttgtcgggggcttcctccgctatccagttcacctcttccaggagcaccatgaactcgtcgaccttgaaattggtcaggtttatcagcgcgttgtacaccgcgttctgcgaggccttgaggaccgctcgagcagtcaggccggaatgggacctctcggcgacacgcttcgggatgccgcacagctgggcggagtgcagcaggtacatgccgcatgcttgctcaaggaccgatatgtttccagcgagctgcatcatctgcgacatgcccagggaacgagcgtatatcatgttcagaaagctgtcgttcagcacctcgataagcagcctgtctaggtatgctttcaccacatcgttgatgttcatgagaccgccctgtgacag

SEQ ID NO: 7663 - DNA, 842 bp, Zea mays
catcttgcatgcctgcagatgaatgccaccatgaagaactggttgcgtgtcatgctgctaccttttctccttcgctccttctcatgaagtgccctggtgagcataatgcatcagaaatatgttgtttcaatttctcaggaatatgttatttttgtcttgaaaatttaccaaatattctgaggctgtacatcagttgtcttataaatatacataaaagatatggttgctgttttgatgggcatgtttgctggttcaggaactcactactttatccctgtgtacttatagcagtccacaattgtgtatgtccttttgcccttgtttggatcttaataaagaaccatggaagtggcaagaggttccgcattttcctacttttcttttgcttgggtatatgtggaattgtggatcaactagcagtacttactgatcttttttgcagcttgtaatttttaaccgtccgttgttgcttgcttgcaaagactgcacctgacgatgaagtggtttgtgacgttgaagctttgaatcggtaagcactttctgttcactttgttatattttagtgctggagttgtttacaacgcatacatcagctcgtactgcctctactctttttttcagtattaatattagtgtcagtgtgtgtgtactgacaaacagtggaggacaaaccataatgtttgtccattgtgttgaaatgattcagcacaatgatatgataccagaaaacatatccatgcaggatactggacattaaattatagcgtttgatgctttgagaatctttttgctaaaaaatggcccactaatgcccccacaacctccgttttactttgtacttg

SEQ ID NO: 7664 - DNA, 576 bp, Zea mays
ctgaagaagctcaactcaactgaagttcacctcagctgaaaagctcagctgcagttgaagaagttcagctgcttttcaacaagaacactctaggtttctcaaacctaaccacggtcaaccatagaattttaaagagatttttggttttcaaaaaatagcttttgaatatagaggattgagctttggcaaacatcaaccttctttttggatccccctttatagtacgacgattcctatactcaaattaaataaaatataattaagtaaactacttgagtaattggcgtctcatgtgtgatttctccatggcgttgcttcataaggatcacaaacatctttgtctcaccttttgaagcaaacacaaatcaaaccctatgacttgtaccatatcaccatatatgagttcaaatcatggcttcaagtcatcttactgatgcatcaacatgttataactcttcatagttgattagttcatcgacttagtgcaagtactctcttcttcaccttagccatggtacctcggtccacaagccgtcgcttggccttcaccttcgcttagttcctcgaagccctttc

SEQ ID NO: 7665 - DNA, 828 bp, Zea mays
agcagcctgcagtttgctcgttcatgttctaggtgctggacaccttttgcttcgcatggctcgggcgctgcacagtccctgttttgtggctccgctgctgtggctgacgttgttactggttgccgtctcaccggggggtgcgttctacttgcctggcagctacatgcacacatactcccaaggcgaggtgatacatgccaaggtgaactctctcacgtccatcgagacggagatgcctttcaactactacagcctaccatactgccgcccccagggcggcatcaagaagagtgctgagaatctgggtgagcttctcatgggtgaccagattgacaactccccctaccggttccgtgtgaatgttaacgagtctgtcttcctctgcaccacaaaagggctcaatgagaatgacgccaagctccttaagcagcgcacccgcgatctttaccaggtcaacatgatgctagacaatctgcctgtcatgcgtttcactaagcagaacgatgtcacggtacagtggactggttttcctgttggttactctccacccggtgcctctgatgattatatcatcaaccacttgaagtttaaggtcttggtccatgagtatgagggtagaaatgtggaaatcattggcaccggagaagaaggatctgctgtcatctcagagacggacaagaatggtatgtctgggtatcagattgttggatttcaggttgtgccttgcagcgtgaagcgtaacgccgatgatttttctaagcttaatatgtacgacaacattgatcccgtggactgccccgtggagcttaagacgtctcaggtgatcag

SEQ ID NO: 7666 - DNA, 1023 bp, Zea mays
ttgcttatactattctcggatctccaacagtcaataacctgtaggcatgtagccaggacacctagctagtttcttccaattcaaagatgtaaaaatggattgcgaccgagaaggttgcatttttgtttataagctgacatggttatcaagtctaccgtactccttccatcttacaacaaaaacacatccacaatttaaattttgtcccagataaaaatgtatgtaaagagtgtcagatcatgtagcaacactgaccatctgctgcaagtttagctgcagactgtggaatacatcaatcaatctttacggatgagaagaggtagtgcacaaaggcgaatgatgtcaaaaagccaatggttccggttgtcagcatgattgcaaatgccatgaggaatgagtagcaaacataaagcattgcagagacaggcccgctcaggcttctgaggtcaaagaccaagtagttgatggagtagaggaacacgtagacagcgacagaaccagaggcgaagaaagccttccaccaccacctccagtcctccacacagaggttcatgtatgttagtacaacggacacctcggcacagacagcaacaagcagcagcaggacaatcagcaggaaaccaaacacatagtagaaccttccaagccatatgctcgatagaatgaagaagagctcaataaacagggtaccaaatggcagtgttcctgcaccaaggacaagaagccacgatggatacttccttgctgggatctctctggggatctgattggtccgaaccgggaattctattttctccgctcttgtaccaagaaaaccaccaacaagcgtcaatggcacagaaatgcagaaccatagagccaggagggtgaaaaatagtgagataggtaaagccccagtgctctcacttttccacaacacaaagtttaggacagtaaggaccgtaaacatgacaccagggaaaaaacaagcagtcaaccaggacactgatctccatccttcggatgtgcccttaatagtcctca

SEQ ID NO: 7667 - DNA, 773 bp, Zea mays
aaagagagagagggggaaaaaaagattgtcagttcaaactccaatacaacatgatgtcacgaatggtctatatattttcctcacaaagtgtagcttccgtaatcatatacctgagggcagattggaaatgatctgctcgactaatctaccaccgttcacaccacgccccttctcctcgcccttgctaccgtgaccagcgtcgccagcgctcgtcttggcaccatcctcagcgctgccgctgcggtccccgttggcgccggacacggccacgccgatcctggaagccacagcgctaagtatcccgccaccgttggattcactcccctgcttctctccaccgttactgccgccacgggccgcttcgccattgctcgacttagcgtcgtccccgctgccgccatggctgtcgtcaccgtttgcaccaggcatggccatggcgatcttggtggccatggcgctcagaatcccggcttgctcgccacctgccacatcctgatctttcacctcctcctctgtttccattgctcctacacgaatcaatcggtcaatcaaaaaggttacactgcaaagatgtaggccctgttcggttgttccggattggagccccggattaattcctagccggattacttctctaatttatatagattttgatgatctggaatgaatcctgtcttattccggtataaccgaacgggtccgtaacattccctgagctcggactcggaggccggagaacaagatactccttggtccttacctgacacatgcgg

SEQ ID NO: 7668 - DNA, 748 bp, Zea mays
tctagtccatcaatcaaatcccagacgagcaaataatcagtaatgacctgaactgttagtgctccttgaatatcattcacccaactcctgatagcaagtgcctgactcactgtacgccgctttactgcctttgtaggaaccaccttgaagaggttaggcaccatttcagcaagtgttttaccttggatccagtggtcagtccaaaattttgtggatctcccatttccaaccgtagtatacactgccatatcgaagagagcaccagccttcatggggaccatgactgacagtccagcccaaggtctagaagtgtctgtcttttgtaaccataacaaagttttgctaggcgcttggcagaatctaggcgatgacccttagcctagggactagtccagcctaggcttgcctaggcgatgctaggcgtttttctaggcgttttgccaacttatataatatatacatttatagataaaaaatagggaataaccgaggagacatacttttatcttgcactttcagattgaccctcaccctctgtcatctgagttctaaccaacagccaacaaattacaaactgaatatgtatggattatgggaataaccgaggagagaaacaagattgggaggagagaaagcaggagccgcaggccttgagcaacagtcaacaaattacaggagagaacagagaagcagccaagcaggacaggagcaatagtcaacaaattacaagattgggaggagagaaaga

SEQ ID NO: 7669 - DNA, 835 bp, Zea mays
agcgtcagcagtcaccacatctctctctgctcgcaatatattgctcatcatcagcacaacacctaacacgtttcaagaaccactcctccgtcacccccctcacaagccttgcttgtagtcgtagctactagcctcaacaactaataccacacgacccactccattactacttagtttttcccttccttcgcagaccatcacggcatcacctccatccagctccaggctcgctcgctcttctcccatggccgcaggagctgcctccacgggcaactggtcgcgtgcgaccggcgcaatgcgtgcggccatggtgttgtgggtttgtttggcttacatgcgcggtgtgtgcgaggactggtcgccattgcggctgctggtgctcttggtggcggcggcgctggtggcgaggtggttcctaaacgccgtgcggccgcctccctcgacgccgtgcggcacgcccgggggcccgccggtgacggcgcccagggtgcggctgcgcgacgggcggtacctggcgtacgcccagtccggcgtgagcagggacagggcgcgcttcaaggtggtgtactcgcacggcttctccggcagccgcatggactcgccccgcgcttcccaggttggtgccggccggcggcggcctgcttgcccgcgcgtctccctagctctctccatcatcgtcttccttccacatgcatgcacatctatgcatcaagcgtgtgtgcttcaggccgtgggcaaccactagctagtccgatagtgcaccggcacccgatcgagcaaagttggtggtggccaggcaccaactccaccttcaacccaacccaacccaacccaa

SEQ ID NO: 7670 - DNA, 806 bp, Zea mays
attcactatagaaaaaaaaagtaggcaaataattttaggcaaagtagccaaacattgccataaaaattacagggaagacaaagataatacgataaatataaatggttacaaggtgaagagccattagttgacattttgacaacaaacaggttaccttgaatctgaggtaagagtttgagaaagcgtatacaccaactgtgtccagcattcttctgcatcctgtattttttaaaaaagaaaaaagatgaacaacattacagaaattcaagagtagatacaaactcttaattgtaggtgattagaaggaacctgttgcatgtagacattattatgctgctgtgcaaattgcgggtattttttacgcagtgtctgctcaaaaccagacaaaaaagaactgtcagtattatacatttgtttatcctcatgacccctcaaaatcttccaacccaccaaactagatcacatagttaaggtaaggcaggacttcataaagcatactgttccataatcatgacaatatatactgaggaaattaaggtccatattttcgtcaactatcaaaacagcaaaagattacttgaaacactaatctatgttccctctatttttcagatattagtggttgttagaatttttataataaccaataactataaggatatccatgatcttcaatgatgaggtctatctatattttattagtaataaaatgtaatatctatcatgagtctatttaagcacaaatctaatgatgtggcactagtttgcataaactaatagtcaaattcaaatgcctgaatgaacaa

SEQ ID NO: 7671 - DNA, 727 bp, Zea mays
gagcgacaccttcccgcggcggcacaactccgcgacgcccgccgagcaggaggccatggcgtccgcgtgcggcttcggcggcgtcgacgcgctggtcgacgccacggtcccgcccgccatccgcgcgccgccgatgcggttccccggcaggttcgacgccgggttcaccgagtcgcagatgctggaccacatgcggcgcctggcgtccatgaacagggacttcaagtccttcatcgggatgggctactacggcacccacgtccccgcggtggtgctgcgcaacctcatggagaacccggcctggtacacccagtacaccccgtaccaggccgagatcgcgcagggccgcctcgagtcgctgctcaactaccagaccatggtcgccgacctcaccggcctccccatgtccaacgcctccctcctcgacgaggccaccgccgccgccgaggccatggccatgtgcagcgccatcctcaggggcaagaagaggactttcctcatcgcctccaactgccacccgcagaccatcgacgtgtgccgcacccgctccgacggcttcggcatccgggtcgtcgtcgccgacgccaaggacctggactacggcggcggcgacgtctgcggcgtgctcgtgcagtaccccggcacggagggcgaggtgctcgactacgccgagttcgtccgggacgcgcacgcccacggcgtcaaggtcgtcatggccaccgacctg

SEQ ID NO: 7672 - DNA, 778 bp, Zea mays
tggccggcatcgggtacctctttggcaccatctcgccggtcatcaaggccgcgctgggctacaaccagcgccaggtggccgcgctcggcgtcgccaaggacctcggcgactgcgtcggcttcctcgccggctcgctctcggccgtgctgccgtcgtgggcgatgctgctcatcggctccgtgcagaacttcctcggctacggctggctctggctcatcgtcaccaggcaggcgccggcactgcccctctggatggtgagttcgtcttttgcttttttcttgtttactccgttcaatggttgttcgtgttatgaacagtagaacggttcggtttagccttttttgtttaggaggaaaattaactgctcttggtcatgaaatctggagattacaggagttactgccgaattacagcacaagtagtccacttgttggctgtcaaattgttctgttccccagtgacaaaactcgatctatttctatttgtgctgtgaactgctcatttgtttatagagttgccaggtaggtgggcctgagatggggatatagcctgtacagtcgatcatgttagtgcaaatatgcaatcaaacaatctgatgcatctaattaaaatccaataatttacatttaactcattccacttgagacctagtacctattttatatttaatccctcccacctaaaatagcagtcaccattgaattttgatcgtatgtattagatcacatgattgcatgtttgtcccaatatgatcgattgcataagatatcttccccct

SEQ ID NO: 7673 - DNA, 848 bp, Zea mays
ggtgctaataatgatgttattttatctcatcagatcagatgggtaaataaagacagcagagttaaagtcgctggggaatgggtcccacatgacagtgggtaggctttgaccgcgccagagcagagcagctgaccgtttccgtttccccatcagtggagaactgaaaaatcacagttctatcaggggctgaggggaaaaaggaatgacggagggagggagcccttgtgaaacgttccatctaccccctcgacgtgattcaaaatccgcgccatggtcccccatcccgtctctcccctagtcccctccgacctcttctaaaaatcctggtggctggctctcgttgtcctcaagcagtcaagctcctcctcctcctcccccccagtccctcccaggctcccaccccgccttgctcgcagcctccccaaaaccctagccctagccctagccctagccctagctctcccacacccgcactgggagatggacggcggcggcacgcaccgcacgccggaagacgtgttccgggatttccgcgcgcggcgggctggtatgatcaaagcgctcaccaccggtacgcgcctgctccttacccatttccccccctccctcgcggaatttgaggatttgtgaggcccgcggaggcttcactcgattggtttcctggcggctaattggtttgatttgattgcttccttgcagacgtggagaagttctaccagcagtgtgacccatgtgagctcgcgcgcgcgcgcgttcctccgattcggcgcgcccgtgcctcggattcgcacgattcggtggcgttcgtgccggaaactttgaggccctgaggcactagactgggggag

SEQ ID NO: 7674 - DNA, 769 bp, Zea mays
  unsure (1)..(769): unsure at all n locations
tgtgagcgtgacagagggaaagctgccgctgctggctcctggctgtgctgcctgtgtgacccgtcgttacccgaggcccgtgggtgatggataaatagatagatgacgggccgcagttgcttttaattttttttcctttttacctggctggattaactgggctcagggaaaaaacggaccgggtcgatctgggcgggccatcccgaccggaccgacggcctctctcctctctgcatcgccgacgcccccgccccgacccgacctcatgtgtcctccagtccagcgagactgcctcggcacgcgtgcctaaacgcataggcatagcagtgtcggtggggtggtgtccgtcacattttattttattttttacatgtacacatttaaaggtcattagtattgtgtggacacgatacagtgttcaaccctgtttagatggcttcagcttcatgtcgaacttaaataaaaatagctgggtagccccgcagtttgctacaagtatttttctcattccattattgctttgtaaaaaaaaaaagaatcggcagcattgtgatttgacaagcgcaaggtgtacgggccggaaatcaagacaaaatatatgattcccggtccatctagaccaacaaagcggcccactacttccgcagcctgtcctccgaaaggccttaaccccaaacgaaaccaccctccgcgacaaagccgactactataggctgtcgtagccaacaagcgcgacattcttcgnccccacctcggccgccgcgatgga

SEQ ID NO: 7675 - DNA, 837 bp, Zea mays
ggaagaaggatgtgttgcgcccgcccgatcagttgccagccttccaatagaaaaaacacaaaatttcgagcatttttgtcgaagtcacttaccttcgtacaattccaagacaaataggacgattacgcaagagatcttgtccaggaagctaaggaagccatagacaaaggcacggtcgttgaggtcctcccctaccagcgtgctctccagcccaaccgtcacgacctgctcatgcaatgtgagattgtgagcataaaaaactggcaggattggacatgtagtgtggcgtgctagctaggcacctgcattttataccatgacaagcatatcaatgaagtgaactaataattcacaaaagaaatttatttctaataaaaaagctttcaaaaacccaactatttaccttctaggttcaagtctggattctcaaagtctgaaccatatattaatcctaacggtacaactatttctaagcatggaacccaccgttggcagatcgtttgctgatcctaacaagcaaattatcaggaagtttgttatgttctgagcaatacaaaaatcagctaaaacaatacttctaaacactccggctttagattggtatgatttcacttccacacaagaaccgctaacatcagtgcaggatgtatttgctcacttgagaaacggaaatgaaaacaaagcacactagattgcaatgtaaacgcccaacaggtagcagaagataaactaagatgagtcagacacaaaccttcaagaatttgaaactgtgtctcaaccctgttcagtagtaacatgtcacaaggccatttatattatacaaaacacaatttatga

SEQ ID NO: 7676 - DNA, 802 bp, Zea mays
ctttaagttggaaggtctgggcatctccagctatgatgagcggacacttcacaaaactcacgtacccgtgtcagataccgtatcggataccgatacttcgtggatactctcggataagtatctgatacgtatcgaatatttttgcaattttaaatatataaaaaaaccagatactcctaggacaccttcctgatacttgcgggatacctaccttcatatacaaccgttcgacatagtcgtactcctatatcgagcagccaaaggcccaaagacgccttggtgcttccactcgcccgccgccacccaccgaactatgctgccagccgccgactgccgatttgagccaccatgcgacaatttgtgagtttgtggctgccgctgccggggactgtgggtgtgggtctgtggccgccgttgccgacccgtgccgtgctgccgcccaccgatctacaaatcgacgtcgctgtgtatcgtagccgtctgtgtacccttgccacaaaccgacctacaggtccatgttcttccctccttggttctcaaactccttgcttctcaatctactgagtgctacttctctggcttgatggaatattatggtctgttagaacctaaagactaaagttcctatgtttgatggcttgatggcctgaattttattatctatgtactggttgtgaacttgtgtggtccactattccagcatttaatttttttataatatatatttgggtatcgttgtatcagtgttttttgagaaatagcatatcaaggtatcggtgtatcacgtatccatatctgtatc

SEQ ID NO: 7677 - DNA, 796 bp, Zea mays
tcccctagagtcgacctgcagcaccatattatttggatgatttctctgttggtaatatttgtacactcagctatggtttctattttgtgcaatgtagactgtcttgttttcttgaaggccttttgatgtcggatgttcctcagttgccatttttattattgttaccattttttcagatgccaatcgttggcaagatggagctattgtagccaacaatcctacgatctttgccattagagaagcacaacttttgtggccagatacacgaatagattgtctagtttcgataggatgtggctcagttccaactaaggtaatttattgctgctcgttttattattgaaattatctaacactcatcatttggtgcaattctgaatacttcagaaatttacttgtgaaaataaattttagcttcattggttcaatatcaagcaacagaggaccagactattaaatttgtaggcaaaacttgattcatttccaattatcactctgcttttcggatttgtgacctttaagtgtctcataagaaaattacacttgtgatattgatatgccttacacatttacacttcgactagcgatttctatgaaaatatgcgatttcaaataaattaaattaaatatttatggaagtactttgcttgtttaatataacaacatcttacatagccaatttcatagttccttatatgaatatgaatgatcaaagttaaacaagcttaaatgacaaaaatcctaaattacagtttgagggagtatttaagtagcacatactagcctacatcttgta

SEQ ID NO: 7678 - DNA, 907 bp, Zea mays
aatttttttttagccttcttgcatgcctgcagacctgcgacaatgcatctaatcagacatataaaaatcgaactatgccgtttgtgatgtgaactctggttgccaagagcttcaaagcaacaaaaaaaaatattcattgaatcgtcaagaaccgatgcaacttaccgaagccgtcaacgagcaatgtgtacgtgtaagtaagatccatacacaagtagggcacatcactgtcagaaacatctgggtaggccacttttgctctgttgacatcgaatttgcaggccttcttagccgcgaccctgaatgcggcaggagcggcctttgcgctcggagctttgctatctatgaatccaaccttgccaattaagaagtgaggaaattcgattaagttcctgctgctactcgcaaacatccaaactgaatctatctatctatatatatatacaggtcaagggtagaagtggttcctacatgtgaggcaaggtagtagaaacctgacgcgacgtagatgtcgttttggccagctccacctcccccattccacacaccaccgaaggtgcagttctttgctgtcttgcacggtgccttgagattcatcgccttggcaatctctcccctgcatttgtcatacaatgctccttctggtctagcagtcgcatcgaactgctgtccgttgtaggtatatttaccttcacaaaaaaaaagtttaaggaacgaagcacattggatatatttattatgctatagcctataactggacaatgttcgttcaagaactagcaaatcaagcataaattccggcccatggcaggcagtgtcgttaacgtaccactaaatccgcgcagcatgcaggagctgaatggtccgttctggacatcaaaatctccgttgtgatgcaaggaaccat

SEQ ID NO: 7679 - DNA, 778 bp, Zea mays
atgtcttatttagcagacttgcagcctgcagtacatgcgtacaagaaacgttaaaactgaagattgcaagttctttttacctcgaaccgttgaattagtagaccggaaagtggtgcatctcattgcaatgctgggcaggtggatctaccgtgtgtcgttctggtgggaagagctggtgtagactgtagagtatattttagttctgaagagcaggttaaccatctggtgctcaatagcaaatatttcgaattatttctgactgacggtaggtacttagaaaattgacgtttcagcaggtggcctaataaatcagtttggtactaaggctgtctccggcaacgtcctttatatccatcttctatatccgtcttttatagtttcatctaagcctttgttcggttattccaattccatgtggatgggagtgtattggaatgtattgggatagattttgacttgctatagatttaaaccgactcaataccactcgatccatatgtattaacggtgaaacgaacaagccctaaaaatttcatcctttatatctccttcctctccaacaacgtcttctaaatcacgtattttatacgcaaatacatatattagaaatattttttattttttatacatacttatttttcatactcttaaatgtattgcatgtattttaattttgctaaacaggttatttaaagtattcaaatggatagaagaccgtttagagaaactctatatatagagaatacaacagcctcctctaaatttagtggctcgttta

SEQ ID NO: 7680 - DNA, 853 bp, Zea mays
agcttgcatgcctgcagcgcgccctggtccggcgcgtacagccgcatcgccgagatgccgttcgccttgtacatgctcaccaccgtgctcgccgccggcaggttgttggcgctcatgccgtagcacaccccgatggcctcagcacctgcgatcgaaacgcacatacgtcgtaccaatacttattagttaatcataattaatgctagtgataccaatatatcatgctttcgtcttattattaataaaaaaaacttcatgcatggttcttttggatgaacaatgtcgtgctacacaatgcgaagatgtcagtctctatagcctcccgttgcccacacactcggaagaaaaagccttatctgttcgcacgccacacactgcacccgcctccctctcctctctccgcttcgtcttattaacgttaatcccgtgcttactaatgggccttattattacttgattaattaaccacggtaaatttattatttactgtatcactatcgacttcccatataaggaacattaattaattgccactcctagcttctaagtattaagcatgcagtaaaaatacggtgaatggaatggaatattacaattacaagcaaggaaaaagaaacgaaagaaagtgtacaaattaataaaaatactagaactgaacaagaagcagcaggtcgcagcgagaagaggcggtgcgtgtagaattaaaggaaacccgacgatccactggtttcctaaccctagaggaaagcgacatttaactgaaactttgtatctatgcatactcctcctaaaccttgcttattccttctcgctctctggatatttctggaggactctttattgctgatgttac

SEQ ID NO: 7681 - DNA, 766 bp, Zea mays
gggattagttttgttttggtacgggccaaaacatgtgggtggtttgcggaagagtaaggaataggtgtgaactttgcattgccctgttgaaattttgccttaaaccaagcgttttaactttcatgttattgcttattcacttaaaatttggacagactaattggttggttcctgagtaagattagtatgtggaggaggacaccaacaggtgacatggcatcagagaagaattattattggtcgtggggatgaggaaacttcttggttccgcaattaaaacattgattagttttctgaactgagtcgggcatacgacagggagtagcaagttacattttggggatttgttgaagtgtttaattggctgtggttgtggagatataagtttcagagacttgtggagcttttgtttgtatgtgtatgttcgttggtttaaaattaaacggttgtatttatctatatacaccaaaacaacattttgtaagaagccaaatgatagtgtatgcatacagaaccgttagtcctttaggaaggataaatctaatttgacaaagatgcgaaagaattatattcatgtacaatttgacaaaggataaatcatattgttcgctttggcatcagctattggccaaacattttgcacgattttttttttggggatctcttgttcagtcatactcatctagtgtatctccccttagaatttttttgataaacttctccaatcgaattttctagtgtgcaattgtatccagtttcttacata

SEQ ID NO: 7682 - DNA, 835 bp, Zea mays
tatcatacaatgaccgaacatgtgctgatggctgccttgacttcaatggtgatgttggtggtgaggactttgtagttgggtggccatccaaactaagtggtggaactaggtcaattcgaccgatccgttgagtgccatctggactatatagaagtggactagatgggaaacttccagtaaacaagggagaagttatcggggtaggaagtgcagtggctggtttcccaaacccagaagcactattcattagagctaacctaataccattctgggagcagaaagattcaagggagcgtgcatgatttattttcttcccgaaatcaggactaaaggaagcctcgacaagtaaaaccacacgcctccatcctaaggtaggattactttcgctgaaacctgttaagagaggataaaaaaaacatatcaacaaggtattctaaatatttttttaagaaatgctgaattttgggagagacaaaccttgatttaatgatgtcagccttgaaaatgaaagggatttgtaaatatcagatgacttttcttcctcttggtaccttgggaccagaagctcacaaagattcttgaaagccagaaaattcttctgaatgtactcatcagttgcagcttccaacttaagccagatagcaggatcagtttcatctaattccataccacatcgttcatccactgccaaagtaggaagaggctcatttatttgaatacacaggcttattaggttgaaacatatcaaaagtagtacacaacaaattatggttgtgttgctacagcgcacaacaagttaatagttttttttttagcaaaattttaggggatcctt

SEQ ID NO: 7683 - DNA, 834 bp, Zea mays
ttgcatgcctgcagacagcataggacaaccgacaattttcttccataatgactactggctctgccaccaccaagcatctaaaaaattgaccaagcatctaaagaatgtatcatgctgatgaccatgtattagtacacttatacatgccataagttggtgtagcagtggcagagctgagagctgctacatcaaaactacaggatgggccgtataaacgaactaaaactagaagcttatgtacaagagtctaaaaggcctacaggtacataaaaaaaaaatcctaaagttacaacgtaaatagcctgattctcatgatgggggtgcttcataactaaggagcatcattctcctactgtcgttactgtgctgcgaagagaaattctgatcaagtaaaattagcacaactgccacaacgatggatggaggtcccttgattagtcgccttctttcagcagctaacccagcggcaacagatggaggcaaactacattaacttattgctccattagtcgccttctttcagcagctaacccagcggcaacagatggaggcaaactcctcaagctatcgccgtaattttgatctgcctgttctaggggttcatcaggtcctgccatcgggaatagcgactccacatccttcagcgtcaaaacaggctcatctttgaagtttttggatttacggtttatagtagagcagacagctctgctcctgttcaatttgtagatgctctcttctattggtttcttcacctgaaagtaaataataatgcattgaaaaccgtttccaagaatataatagaaagaagaaaaaaaagaggagaatgtatcactt

SEQ ID NO: 7684 - DNA, 715 bp, Zea mays
ttgcatgcctgcagcggcggtcgctcggcccgggctgcgacgcggccgcgccggcgccggacgagttggtagggaggtgcttcggcttgcgcccgcgcttcttgggcttgtgcttgctgcccttggcgccgtgcttggacttcttcgacggcggccgcggcaggaggtggccgtaatagccctcgccgagctccagcccaccgaacgggggcgagtccagacgaaggaacggcgagaacgaacctgacgatgagcacgaggaagtggtcgttgtcgacgaggacgaggccgagtcggacaagaacggggcgcccgaccgccaccacgccgggccccgcgaccgcttgctgcgcttcgccttcaccggtatcatcgcctccgttgacagcgcacagatggtcggcgtccgcagcgggccgggcggcggcgccacggcccggtacgcaccgtcgtgcgcgaacggccgccgctgctgcgcaagcgggggccgcccagccaacgacgcaaccacagcggggggaggctgcgcctgcggcggcagctcagagagcgagtcgtccatgatacgggacacccactccaactcctcgacgtcatgcgactgcgggaacgcaagagcagcagcaccgcataaattagtcactttcccaagataaccaagggaggagactcgggagcgacgaagtcttttcaacgagcaaaagcggtcggtgga

SEQ ID NO: 7685 - DNA, 599 bp, Zea mays
ctagcttgcatgcctgcagacccaagtcgtaatctagcccatgcaccctgcgtgcgtttgggcgggtccagttgggaacccccaccccctacacgcccccaatccgccatttgaaaacacgccaccgcatcctgaattcctgagctacctccaaaaacccgtagcggggcgccgggccggccacgggcccaccacgtgccctcggccaagccgcacttaccctagttcatggttatctctagccctcgcgacgccatccgggccgtccgctaagtcagcgcgtatcacgacgcgctgtttcacctttcctcctctttggtttggctccatttcttttcaaaagtggaagggcggaagagcataagcgaggtggcggaaataaaataaacaagaatatatttatgatatcgcggtgggacaaaaaataaagtaaaggagggcgaaagcgccaaagtgccgaggaagggtgtgatactgatttcagacaaggcggagggggcgagggtgaaacgacgcgtcatttgttcagcagcccacggactccggcagccattcaaggctccaccaacaaaacgctcatccccttcctgattctcggc

SEQ ID NO: 7686 - DNA, 766 bp, Zea mays
tcgtaatctagcccatgcaccctgcgtgcgtttgggcgggtccagttgggaacccccaccccctacacgcccccaatccgccatttgaaaacacgccaccgcatcctgaattcctgagctacctccaaaaacccgtagcggggcgccgggccggccacgggcccaccacgtgccctcggccaagccgcacttaccctagttcatggttatctctagccctcgcgacgccatccgggccgtccgctaagtcagcgcgtatcacgacgcgctgtttcacctttcctcctctttggtttggctccatttcttttcaaaagtggaagggcggaagagcataagcgaggtggcggaaataaaataaacaagaatatatttatgatatcgcggtgggacaaaaaataaagtaaaggagggcgaaagcgccaaagtgccgaggaagggtgtgatactgatttcagacaaggcggagggggcgagggtgaaacgacgcgtcatttgttcagcagcccacggactccggcagccattcaaggctccaccaacaaaacgctcatccccttcctgattctcggcctccgtctccgcctcttcctcctcgcctacaacgccgccaccacagccccggccccgtgttgttcctgcaccccacccgtcctgcgaggctcctccgacatgccgtcatacgcgcaccaccatagcagccctctggtaaggaacggtgccggccgtgttgtacctaaaccactgaggggacagaaagagaatc

SEQ ID NO: 7687 - DNA, 784 bp, Zea mays
atcttgcatgcctgcagtaagcgaggaggtgcgagcggaggaggatcgccgggatcgccatactaggttgtccagggcgtcggcccctagggtagctggccctcgactacggagattgtagtctcggtccgtgttctccggcgaggttaatcacctctgccgcaggcttgttagaaactaggaagaggggattaaacatgtaacaaattacttgattattccttgctgccatgcggcttacatatagccctgttgctaacaaactcttcctaaaaactctcatctaatcttggacttatctaactaactctccttaattctctcatctaaatcttattctctggacttatccaaaccgactcctaatcagcccctggctgttggcgcccccttgtggtctgtgcgctcggccaccctgcgcacgtcacgggcgtgcctgagtctgctgtaggtccggccccacatgacaaatatatattactaaaccaaaactctgatggctgagattgctatgaatatcttgcccatccacaggtaccgaatctccgatggccatacattcaaaaaaaatcaactatacctaggaatcttcagacagacacaatcacatttttatattggtccgtcctcgccccagcgctcgggcaaggccgtgatgttgtctggtcctgcctgtgatgggtcgttggggacgtctgttctgtcctcgccccaacatgcgaggctgaccaacgatgccaggtgcaggaagacggtggatggttatttggtgtatggaaggagg

SEQ ID NO: 7688 - DNA, 834 bp, Zea mays
attggcttggacgatggactgcagtgtctgcatgttggccatgagcgtctccaaggtggtcttgatgtcgtcccccatggtactggtggcggacggcgatgtcgccaaggcggcggacggtggagagtgggcggcgggctgtggctgtgaagcaatggctggtggtggagaggaggagcgagcggaggaggatcgtcgggatcgcgataccaggttgtcaagggcgtcggcccctagggtagctggccctcgactacggagattgtagtctcggtccgtcttttccggcgaggttagtcacctctgccgcagacttgttggaaactggggagaggggattaactggtaacaaattgcttgattcttttctgctgccatgcggcttacaaatagccctagtgctaactaactcttcctaaaaactctcatctaatcttactctcctagacttaatctaatgctaactaactctccccaattctctcatctaaatcttattctctggacttatccaaaccagcttctaatcagcccctggctgtcggcgcccccttgtgtgcgtggcctgcacgctcggccgccctgcgcatgtcgcgggcgcgcctgcgcttgctgtaggtgcggccccacatgacattccctttgctgtttcgttgcagaaaaggaatgggttaggctctttcgaaagaactctgcaaggtccaaccaaaattcaagtgatagtattcacaccatgataaggccttcatttccaaaatggtatttttgtgcatgaagttcctgagcagtttcccaaaatagtgatgtcacagcaattggttgatgaaaccctgg

SEQ ID NO: 7689 - DNA, 807 bp, Zea mays
tttattgagaattacggtacccatattattatttctgttacggttggtggtaaggacgaagtatacattaagcagcattcatcgtcccaattgtcagggttagagttcaaaaattatgtgagggaaattgggagggaaagattctcagatgtggaaaacaagtcaaatgcaactcctatcaattacagcgagaaggttagcaaactccttactgctttctttatctaagttcactagaggtgttttggctacattatttggtttgcctgaattgttatacaactgtttgtttacaaaggatagtttgtgcatgattgattactttttatgagcacttgatgcatctctaaaaaatgtgttagctgctgtaaataaacagtcacaatcagttttttattggaaaactgtgggggagttcgctacaacacatcatttttttaataaaaacagagtacaacatatgtacaaaagaaaagaaaacttcgattacacaagagactagccattggaaaacagaagggtcacgatcctctctgactcgatgcatttggaggatggactaatccttgaatctcatggtccagaggttatgaactagcatgatctccataaaaatccattcctgagcttccagagctcccagcaggctgccatggaaatctcacaaatgtgaggttgtctcactgctaaaagcctcccatgcaagttcaagtgtaaatctaactgtgtgttgagagtattcgaggttttgcatcaccgcgtagcaaaaggaaaggcaaagaagagatgatcaatatcttcctccat

SEQ ID NO: 7690 - DNA, 783 bp, Zea mays
cttgcatgcctgcagaagcgcctcgctgtcgcaggtggagctagccaagcggctcgttgaggtgtcgttcgcggaccgcgccttcttcgccagcactggcacggaggccaacgaggcggccatcaaattctcccgcaagttccagcgggccgcacacccggagagcggcgacccgcccacggagttcctggcgttcagcagcagcttccacggccggaccatgggcgccgtcgcgctcaccagcaagtcgcagtaccgggagcccttcgcgcccgtcatgcctggggtgaccttcgtggattacggcgatctggaggcggccaagaagttcgtacggtccggcagggtcgctgctgtcttcgtcgagcccgtgcagggtgagggtggcattcacagtgccaccagggagttcttgcaggggctgcgggacgcctgtgacgaggcgggagccctcttggtctttgatgaggtacggtgtactctgtcccatctctcttctctgaatctctgttcatatcgagaacccgatgatattgctagtaattcatatttcgtttacaaagcacgaaacgcgcacaatttagttgtagccatgcattccactatgaactttaggcatacagtccatatacaagagataatgtagcagagtcaagctgtgactctgttctgcattcctatcttcaacccagcgacacatcatggtcacattccttagttttcaggctgcatcaatctgtcagccatgagatgtagtaatgggggtacctatatgctttctaa

SEQ ID NO: 7691 - DNA, 1458 bp, Zea mays
cgaagaattccctctccgacatttggcgcgtcaggtagggggctaggcattaggtttttgctagtttcctcgctcagcatgatggtgcaaatcgttgagcaccgcgccgagacttcaacagatttcctggtggaggaagaagctgtttcttccacgccataggttcccaactgcccagtgccgggcactgctactgtgcacgctgcacggcggcatacaactgcgcagacatcccggactccatcgaaagcggctccgggagcattgtcagcagccagggagttgctgtgtcaccctccaagctccacggcctcaccgggggccatgaagcaatggcgggacgacatcgaccgactgctcggcatggcacattctacctcgaccaggtcgaggccacggtcatcccggcgccaacatgaggcgtcagcgtctgtgcgctcacccttagtgaggggtgcacagaccaacgacctccgggcagaactcaaccgcaggcgtgcgggagaggatgcccggatctctttagagagggcgcacgagcgccggcaaaacatcgagggtcgcaacctcgatcaagacttcgctgcggtagcaccgcaggccccaatgggcacccggttccagacgggtgtccccttggccggcgtgggctgcgccgctctcgcggatcatctccgcgcggcgtcctggccacccaagttccagccacacctgccggaaaagtacgacggtacgtcaaatccgtcggaatttctgcaggtgtacgtcaccgctatcacagtagcaggtggaaacaccgctgtgatggcaacatactttcatgtcgccttgtctggacctgcccggacttggctcatgaaccacgccccaggatcaatctactcctgggaagagctctgcgcgcggtttgttgcgaactttgccagcgcttaccagcaacacggtgtggaggcccacctccacgtggtaaggcaggagcccggggagactctctgggcgttcatctcccgcttcaccaaggtgcgaggtactatacctcgcatttccgatgcttccatcatcacggccttctgacagggagtacgtgatgagaaaatgttggagaagttggccacacatgacgtggagactgtccccacactctttgctctggccgacaaatgcgctagactcacctagggccgtgcatggcactcggctccacaaaccggggctgcccagtcgggtggctcgggtgtcgtcccccaggacggtaagaagaaaaagaagaaggaccgcgactaccagagattgtggtccacctctctagtcgttgcagccgcgaccgggggccggggcgaccacaacaaacgcccacggccgcagaggggtaacagcagatcatgccctatgcaccccaatggtcgccacaacgccgcagagtgttacgagatcattgaccttgcgaaacgcgttaac

SEQ ID NO: 7692 - DNA, 815 bp, Zea mays
aagctggacctcagctacaaccgcctgtgcggcccgctccccaagggccacggcgtcatcaagcacgggtgcaagccgtacgcgcacaaccagtgcagcaaagggaccccgctcgcgggatgccaggacctggagtgagtgagccggtggccaactggccatggctttctatactctgctctgctccctctccctcgccggcgttcttttcgtgtcccaatcttgaaggacgacggtacggtgcctggtttagctatagacaaaaaaaggtacggccgcgtggtggcggtgctaatatgcttagccacgcccacgcgcggttgatctttgagcagttaagcgtgtacgaaatgacagctgtgtatgtgtactgtctggtggagtgtgctgtgtatctggtctggatccgatcggcctaatgtatgaaaaaaaaaggatgtttacgtactaaatggaaaatcattttttccctcttcttttatatgaagttgcgcctgaatcatctatcaggcaagcagtaaccagcaggtgagcaggtgtattgtaacgagagccagcacggagaacagcggtggtgctccttttgtaccgtagctttacaaagccattttcagattctcaggtcaagcagattcaaataactgtttctttagcttctctcacgtattgaaaaactaggaataccatagatttgaaatgtgtccaataccaaaactaggtcggaattgaaatgagggttaaatcccatgctaatgtgggctatgagaagtgtccaataccaaaactagattcgaattgaaatgaggcttaaatcc

SEQ ID NO: 7693 - DNA, 2112 bp, Zea mays
aatagccttactctggctagagaagggggaatttgaggctcctccaaaagccctttataacaacaggtaattgcccctgggctttcaatccctttaaagggcggggcaaattaattggccctaccctcccggttaaaaatgtcccatgggtgggtgagtgttccggtccggcttcttccttccagcatttcggaggaaaggattgttcacaagcctgttaaaggtggacaccgggctaagctgtggctccatccctggcgcccccaaactccttggggtggaaagcgagccgtgctgtggttccatctcttggcttttgatggcttcggtgccgcctccaatggtgcccgctggcctgactgctgaggacatcgcccggggggtcgtacaagacttcgtacgccatggaggtggcaacagcgcgctttcagcgcgaccctactgatgtcgagtaggtcatacctgtagacataaggctaggtccccgcttgaaggcagatgtaataactttgcttttgtaaggtacttttgagcactacttatcgagcagtattagtacttatctgcctactatttgcccctgttgtgtgtggcgttgccgactcctccctagtacctagcccccctaggatgtaggctcgacgtgtcgagactagataccagcatacctaaggaagagttggcgatggcccccaggaggcagcctcgactgggacctgggcctgaacacagcttcgactagggagcattagtagtacacccataggacccgtcatctgacactagccatcctttgatacatgctcgggacctgcagggtctagtctgggaggccaagttgtgtgtccggaccccctggatggtggttccaaatactaggacacccgtcgcagagtggtggagcgtgcaggctcacggtacgggaccaggctgagcggctacacgggctccggaccaccccaggagacaagtgtccattctctagttctggaccccaggttgtcggacccacaggactatagctccaaatactagggtacccgtcacagagtggtggagtgtgcaggcttttgggtacggaaccaggctaagcggccacactgctctggaccaccccatggaacgagctcccgttctttagaaccggcccctaagctaccagaccccctgctttcgtagaggggtcctaaactgcaagcctggctactcaattcggatgtcatcgtgccggaacagatgggaactacactggtgggttagataaaaaataatatccggaaactgcaggataaaaccatggaggcaggaggataagactgtcataggagcaaatttgagggggtaaatcttctctttataacttgacatgcatgggtgcaggccaacaggccgggcttatgagggcggacctcaccgggttggcgtacacgtatgtgcaacctagttacaaaaaggagaaaattcaacccctcaggcttgctcctatggacagaacttacagagatgctccaggggttaggaagaggtgctccagctgtagcaagttggtcacccccgggtcggcacatttccgtcaccttgaagggtccttcccagctgggggagagtttacggaacccttctcggttcagtactcgccattgggctaggtcccgaccctgggttcccatctgcgtttgatgatagagtccacgtccttacgctgtagccgtttctgtatggactcatcagaagactggacccgtggggagtccagaagggttttcgagggaaggcaggcttcggccccgtagaccagggagtacggggtccccctggtggcccgtctagctatcgccaccggagttagagtatccggtgatgacatccttcaggaccccctcgggtgactgatacccgaggtcccgttcagttgcggccacctcgccattgtcgaccctttccttgccaggtcggcgatgaagtggggagccgtccctgggagactgctcacgctgctcgctgacgcgtttcgcgaggtcgatgatctcgcgacactccacgacgctatggcgactattgggtgtacagggtatgagccacttttaccccttgcgggcctgggcgcttggt

SEQ ID NO: 7694 - DNA, 787 bp, Zea mays
cttgcatgcctgcagttgccaacttgacctaagagggggcaggcaatcctgctcgaccttgccctgagcgcccttgagtagaaggcgagggaagagcagacatcgaaaagggatggtgtgggtggcagtgagagttggtgcacgacagagataggtgccacagccagcggagaagggcaagtagagagggctcggccaatgcatgaatgcagagtgaataaggagagtaggtattttgctccgtgagttcagtccaaacacagtgaatcaatttgcacaattcacaggtggagcttgagcagccagcagtgtttggtagtgctcctcagtttctagttggaatgttggcttaggagcactatgaggctatctccagcagcttactcatcctcatcttctatttgaaactacacaatgtaaacagtgcagtctacaatgttttgcacgggcgtatgcacaacctgctgactatagcctgaaatggcccctaatgtgcttacatgcatatactagtatatttccttacagcaactccaatgcagggggggggggcagcatggtttgattttatacactggggaatcaactgccgaaaactcaaaactgagccatggtttaggtttgaatagagggcaataaacaaatggaaccagctggccagaagcacagaacacaggaaaacagaccctcagaagtcaagcatagagcacttttctccattttttctttgacatggtcccactaaccgatttggagttttagagctgattgctttttcattaacttt

SEQ ID NO: 7695 - DNA, 804 bp, Zea mays
gcttcttcaccatcgccatccgttcctcctccgtatcacaacgtatccggtagactgacggatggccatctttccggtagtcggtgagcgtgctgatgttgaggtatatgacgggagttttcatctgcctcaagacctgctccaagacaaccatcttctcagggtactcagtaaggtacgtctggttgaatattggctcggtctccccgtggcatctccctcctgagttccactgccctcctctgttgccaaaaatatttcattgtcaagtgaagatatatggcaccaacaatcaaccaggaaggaatccagccagcgaagcgtagcggcggcggcggcggcgatgtcttacctgaaatgcgagagtgagtatcctctgaacacgacctgagtcctcctcggatcgatgttcttgtccacccatctagcccaggtgacgagggctctcctgtacgcgtccagaacatcgaggctgggatacacatggttaccctcttggtagtagttcagcctgtggactagcaagcaagcacttcagaatgtttggattatggaaaccaagtgacgatatgatactcgctccagaaagtacaatgtaccctcttgatgttttgtagtgagtccaccagtggccggtgttgaagacgacgatgtccgcggtctggtatgctggggtcgtcgcgtctagctcatccagtttcagcttcgcgtcttcagtgccgtttctgccctcacggatcgtctccctgacgaggaatattgatcttatgaaatcaaccgagcaattgtagtcctgcaagtgaa

SEQ ID NO: 7696 - DNA, 801 bp, Zea mays
cttgcatgcctgcagctcgtcagtgagcgctccctcctcctcctcctcctcctcctccttacttacctccttgagcgcagctcctgatgaataatcgatggatcgcttactcgacagcatatcgagctcttggcctgttgccttcttcatccccgctggaatctcatggattgtttgttaaggtagatggcaatcggtctatttagtagatactagtagctctttgcgtatgctgtttccaaacacctcttcacatcagtactagcactggtagtacatagatcagtttggatttcatgttgtctttggtgtcggcttcgaagcagattcaagtcaaccgagttcaatactgacggacatcataaaacggtagagcatcgagcacgtaacgattaagatgtagttggtcctagggcatcctctatttctttctctagaggaatatctgtacacagtttcagttctgtacacctgtggtttggtcgatataaccatgtccgaccagcctgataatgttcccaaggtatcaaaattatacttactgccttactgggatagctgaaaatattggaactgggtaggaatagccgtgcattttgtgaagttaattaatgcgactactttttccaggacaacaagttagtaatcaacaaacgtggattgcacaactcctgaacgataattgttttacataatactttggagatgcgtttttgtagtaattgaagtttgtcgtaaacttttgcattgtttcattattagttctttctacaccctccattttaaattgtaagacatttt

SEQ ID NO: 7697 - DNA, 739 bp, Zea mays
tgaaaaatcggaatgttgtatctttagccttttgtacagttgtgttttctgtggttatttgttttgtgtgcatttgtattttggatgaaggggaggctttgccacccaagaataaagagtggatggatgcatgacgaacactgactgaacacgtcaaaattggcaggtggattgatgagtttccctacgctcggtttggggggaagcaacatcacatatgtacaaggtcagtttggacgccgcagcatccatccaggaacgagacatcagtccgcgagccagtccaggttgtagcactcctcggccacctgcacgcggaggtcagggatgacctgctcggcctcacgccacagcagcgccgtctcctcgtcgcacacgacgtgtccgagggacttgagcgaggacgacgacctggggaggctcctgaggcgcgagcactcgcgcatgtcaatcttctccaggctcgtcaggtggccgagctcctcggggaggtccgtcaggttgatgcactgcgagatgtccaggtacttgagccgcttcaggctgcacaccgacgccggcagccgccacagcgccgggcaggcgtacacgcggaggatgctgaggcagcgcagccgccccagctcgtacggcagctcggtgaggtcgtggcagttggagatggagatggtctccagggacccgatctcgcagacgctcggcgggaagttccttgaggtctatgcagtggtcgatcgtc

SEQ ID NO: 7698 - DNA, 827 bp, Zea mays
gtcaatagtaagttacctgccctatagctaaaattgacagacaatgatggatcgctgaaaattcaaatttgttaaattctcgcgcattgaagaatctggcacatgaacatgcagctgtgtgcaaattagacagggcaggcatggattaaagaaaaaggctgcttcatatttcatgttgataaaaaagtataaaatattatattcatggcacagaaaaaaattccaaatcattttattttcattcctcagtgggtctttcagagttcaatgacaatagtcattctcttatggttactttgtcccattggtgataatggcttgtgtgtgctcatttttggttgcctgtggcctacatgaagtgcaaagtatgcacattgcacaaagcgtgttgagctgacactcattgctgttacagtagttagcaaattggctcctggtatctagtttcaaaggtataaattagcgcaaaaccacatcaaactagtaccacatcaaggattatgattgccatcatttatgcaggttgcttctatgagttgatttatgtatatgcctgcaagtatttagcaccatttgttgtgctgaaatttctgtttctttttgctttgaaggtagttgagtcttcgtatgatggcttgatcacttcgtatgaaaccttgcgatagcaatattttggtccaccccttgtgatcacatcctgcatgggtgaagatggttgggccttcagcagccacaaaaaaagtatatgccctagctggcttgttggtgctctgtgattcttagaagcactgaattgggaataccatcaaaagaggcatcaatttacc

SEQ ID NO: 7699 - DNA, 866 bp, Zea mays
gtaatgactgaacttagcttttgcaatgcagctatataccatcacaactctgattcttactggacagacgatctactatagccacatctaccatcatcttaaactaaaaaactccagggcagctagcaaggtagttactcttgggcatgcagataatcattttgggcttttggcatcctttttttttatgaaatttgttctgggtattgggaaatgtatgtagcactctgttaacaactgtgataagccaaccatatttggcttgcacttgtgcgttcataaattatcccatctcatagtttagcagttcagtgttctttatttgctctttctagtcttattgaattatccttgatttgatatctgaagatttattaattttagggaatgttcacttgatattgtcacggaactataacttttactgcattctaaatacgaaactgcctctcttttgggtacacctgtggtttcagcctcaaaagcatcaacaccgggatgcttcattacgcgaaaagcttttgggtgccaagggcagtgcagcatcaagaaacaatgaatcagatactacagttcttattccaagctcacctatccctgttaatatgaaattggttgaccaataccatggaagcagctccaacgctgactactactacatgtaatcttcttgagctgcttaagtttccctacatatctttcctttataaaagctattatccaccatctgttaaaacaaagttatatatttttttctttatttgaatgaacctgataataatatgctcttcattgctacttatttaactgctgggtggttctgctttcactactttgcaatatgctaacaaatagtcaaatacaag

SEQ ID NO: 7700 - DNA, 782 bp, Zea mays
aaaagggagttcacaccacctttttattgatcggaccattccaggcgtatggaatcttatgttgaatcaaagggacatccatccaaagaacactatagtgaaaactgagaacacgggtacatccgctatgaagaaagagagagatagatctaaggtcatatatcaaaggattctagaggataaggacatgtacaaatacaataggtgtcttaagctgcgtctttgagtatgtataatgaaataatgtaaaaaaatcaagacatgtatcttaacgagtttttttggctctatgcttgagacagaggactaactgattgatcaatttaatttattgaatgttttgattggtgcaatgaatataacaatacacatgttttagatacgtccactgtattatattgtgttttagctgtgtcttatacttgtcgtaccatgcagcggtgtcaggattgtacatgccctaagatacaataatgtttagatttgttgacctaagatacaataatgtttagatttgttgagttgtatgaaagagtttgttagatgtatataatgcttagagtgcaacatagaagtaatatatattagtaggttgtatatgccctaacatgtctctccctgctttgtcttttgctcccgacaaaatctcccttgctctttgatccgtcgatttgattccgtctcaccagctggggagcctagctgcccgttcctcgtcatcgtcctcatctactcagcattcagcacccatgcagaaattctggttcttgattttataaatg

SEQ ID NO: 7701 - DNA, 771 bp, Zea mays
aaacagactgagatgtagtactatgttggcttgtagagcgctttagtaaggagtgtgagcttccttttgacatgccagaatcagacctgcatatggacatctatatattataaatacaatatgaagctaactttcctctcacctaagtgggcattcaagaaaaatagtttgtgcttgtaaaacaatacaatgaacactgtagaaatgagttagaatcatggagatgtatatgccttaataacaagtataatgtagtcgcaactcttgtccacaaacaagcctttgcattaagataggcttatgagcaaaggaagctctcaaggatcaaagtgcatattagaattatccagtgacctaatgtgagatcatcagaataaactgattgagtaacacgcaaaaaaatattagaacggtaatttggtggaatgaggaggatcagtgaatatccttttgagaaagatagcaaataatggagcaacacatctacaagtttagaagaataccatttactaacagcttcttcagaaaaattagtatcatccccagccaaacttgcactagaaccctgccttttaccccttgttaattcattgacactcccaaccagttgattagctgatgttctaccacctgtggtctctgaaaagtcactttgaacatcgtcaattccaaggaaatgccttctgctcaaacattgaatccaaaatccctgggtcctaaaggtttaaaaaattttcccaggtggtttctccaaataccttggttgggggg

SEQ ID NO: 7702 - DNA, 780 bp, Zea mays
ggaattagaattgagaaggactaggagaatggctacaaaagcgactaacatctcttctgctgttggtacttcgatgactgctggttctgatgaggttgaaacaaaaaggtcttcaactgggaaaaagattaagaaagaaaagaatgatctttcctctgagctcagagatctaggctggtcagatgcagaccttcgtgatgaaacaaaggctgcccctatgagtctggagggagagttgacacagattcttagagaggtggcccctaaaccattggagggcaagagaacaggtggtatcgataaatctcaggttaatgctctgaagaggcaagctttactgctaaagcgggagggtaggcttgctgaagcaaaggaagagctcaagaaggctaaaattttggaaaaacaacttgaggaacaggagattctaggtgaagcagaaaactcagatgatgatttggctgctattattcggaacatggacgacgataagaatgatgacatatttatagatgattcaaagttcccagctttaaactttgaacaaattctggttgcctctaatgatcttgccactgatggtcactttgacgttacagatgatgacatgaatgacccagatatggctgctgctctaaaatcatttggctggagtgaggaggatgacaaacagttggaaaatcctgaacctgtttcttcaaatcaagaggggctaaaggagcaagtactttctctaaaaagagaggcctgttgcaaacaagaaggtctggtaatgttgta

SEQ ID NO: 7703 - DNA, 788 bp, Zea mays
gaacccctatagtcgacctgcagtctcagcttcatcagatcctggcatatctgataccaggttggtaggattgccccggctacggaggttgtatgagtggctaatggttggaggaagaagggtgagaggatgccgtgctgacgcctggcctagggttcaggtgcaacaatggatttgagaacagcagggaggcaagactcaatctctttctttgattgatctttcctgattacagactagaggcatagagggcttatatactgcccgacctaacaagacttcctccttttaaggggatctaaacaaactacctttatttaaggaaaatctaaacaactctagctatcttatctgagtacttatctgctcagcctagcttatcttcccctggctgcttaggtcggcgcccatatacttttccagtcataacacctatgtaaattgctaatttcccagataataaggatgcaatgaaatataagtatgataatgatggtctgcgtgttagtttccttgcatcatttttgggcatcagtccattttgctcacgatgatgaagcttacacgttagaaaaaacttgaaaaaactttggtgatatggtgttcatctttcttttctttgaacattaaactattggctatttcacttaagccccgtttgtttcctttcattttgaggaattggaatctaactaatggagtaggctataaatttacatgttagaaaaagttgaaaaaactttggtcatatggtgttcatctttcttttctttgaacattaaacaatt

SEQ ID NO: 7704 - DNA, 793 bp, Zea mays
ctgtccctcgccaccgcgccgtcgtcggcgtagtagatggcgcagtagtcagccacccacttcttgatcgccgcccacatgtcgagcccgtccaccgcgtacgggtagtcctttatcgccagctccaccgtctctggcttctttggatctcctttcgccagacctctgtacgtacgtcatgtatagcatgctgttgctatggtatgtgaacgaatacatgtcatttcgtttcgtatctagtactggtattacctcttgatgagatcgttgggaagagcaagctccgtgaagttccaggctttgtacgccttggaggacatctccatgttgtacttgctggggaagtaggtgacctcgtctatgccacggaagacgctgccgtccttcctctggtcacccgagccgacgatgatctggcgtgcgacggcgttgatgtggagcgtcttccggaagtgcggcttgaggagcctgtggattgggtgcagcacgctcagctgccggttcgccgcgatcacgatcggctccatggatgcgtgcgtgttgagcctacacacacagagacacacattgacctcgtcttgtctctacgtacgaacgagtgtacgtacataccagtgagtgacgaagttgttctcggctgcgtcgttggcagaggcgtaaacctttgccagttcccaggttgagaacctcccgggccgtgatgcccgtcgtccccgctgtccgggggagtgtacaccgtgctgacccggccgagcttgttcttctcccggtgcgggcgagctgagctcgaacg

SEQ ID NO: 7705 - DNA, 755 bp, Zea mays
agtttagcggaaggtggaaggaacgggaatgtcccgaactcgtgataccatgtgagagagatatgctgtttaggctattgtatattgaataaatagagtgccaaccggttacagattatacagggggaggaggagatcatgtggcttatggaaacagcgccagagtgatctcctctatcgatcagaatcagatcttcctagtgtgggctgatacagattgatcccctacaccaatcagggtatatctcctaccataactagcctggattctatcaataacaatcctgattactatccttgcctagcacacatgggtagaataggaaggtactgctaacaaaaagcatgattgaagtatttaaaccactaaggtagagcaaataaggtaattaaaaaatgatggtggcagttaagcagattttattttagtacatgcctgcattggcattgaaaattacactaaacaaaggcattagctattgatagagagaatgaaaaaagttggtcgtgttctgactgagaaccaaaaaacagagctaaggactcagcaagttgctgtcaagaggatgggttgacaaacctctttgggagttttgcggcttcttcacacctaaaaagttctgcataaagaccatcaaggtttaacaattcttcatgtgtccccatctcaacaagttgaccttcctccattactgctatataatcagcattcctgataagactgaggcgcccgagctatgatgatggtagacctc

SEQ ID NO: 7706 - DNA, 1132 bp, Zea mays
gtagctgatcgtgagcacccatggtgaggagggaggaacgggagtgtcccgaactcgtgataccatgtgagagagatatgtggcgtatgctattgtgtattgatgaatgaagagccagccggttacagtatttatagggagaggagatcatgagtggcttatagaaatagtgccagattgatctcctctatcaatcagtatcaggccttcctagtgtgggctgatccagattgatcccctacaccaatcaggatctctcctaccataactatcctggtttctatccataatagcacagattgttatcctagcctagtacacggcaggaactgctaacatatatatatatatattgatttattgggctgtcataggcctgcagcggatctcagtgagctggatagcgctttctcggagaaggaggtgagggatgcgattgctgatctgccttctgacaaggctcctgggcctgatgggtttacagggaggttttacaagacctgctggagtattattaaggaagatctgctggctgccctgaattttctgcaccaaggaaatgctcataaacttgggctgttgaattcagcctatattattcttctccctaagaagtccgatgctatgactgcaagcgattataggcccattagtctcatccacagttttgctaagttggtcaccaagctgctggccaacaggttgggccctcatcttcatgagttggtggcagccaaccaaagcgcttttgtgagagggagatcaattcatgataattttatgctggttcagcagtctattaagtcgctgcacaagaggaagattgcgggtctattcttaaaattagatatctcaagggcattcgattccgtgtcatgggccttcattattgaaattcttgtccatcttggctttggtccaatctggcggaatcttatttcctccctaatgttcacgtcttctacgcaagtacttcttaatggctcgcctggtgctcgtattgctcatcggcgaggccttcgtcagggtgatcccctttctcctatgctgtttgtgatggtcatggatgttcttaatagtctgttcagggcagctgaaagcagggggctgttacaagggttggaggcagctc

SEQ ID NO: 7707 - DNA, 767 bp, Zea mays
ttggtattttcatttttcatattattatacattaccgtattgtacccttagctaatgccatagaccatgggacgctgctaagcatatggaatctgctgctgctttagcaaaggagcttgggcgctggaatgaagtatctgatttctatcacagagcttcagaattataccgtgaatgtggaaggccacaacctgcatctgatgctctagcaaagggtgccaggtaaatttaaatctcaccttctacagttgtggcattatggatgcttttgttctaaacattgtattatgatgaattcagtgcattggaggagaaatctccagaagaagctatcaaaatgtatgatgaggcttgttcagttctagaagaagatgggaaggaacagatggcttttgacttgtaccgtgccgcagcagctttgtatatcaagatggagaagtaagatcactttaatgcttgcttatattaatttcgatgtatagcctcacattttcatctatgtgctatctcattcatgatttccttggaacattttttgttcattcttcattgttcttacatgtgaagtaagtgaactttgaaacaaagaaagacaaacagaaaatgttttgaatatacacttctgaacctaacaccttggaatcgtgtatactgatagatttgcatgttcttatcttgtagcattgcaagtaactaacatgaccatcttacaattcacccccatatttgtccgttggacagatattcagatgccgctgctttgtttt

SEQ ID NO: 7708 - DNA, 799 bp, Zea mays
ggagaagattctaaacacctctccccctctctctagtctctactcgcccctagcttttccatctcttttctcctccacccgaaatgattcaatttggcaaatttttttctcactctaaaaccgcccatttcccggctataaatggccccctcctccaggcttcaattcccttttcccctcttcccgagctcccttgctaggttcctcgtccgcctctctgtcctagtctcgtcagcaacagcacagtgttgttactgacgcgccttcactctgttgacctgcatctagccaagtttatttggagactccaacctttggtctcccaaacttggagctcccaaggggagaggttctgccaaaattttggcttctgagcatccattttcagggggaggttctgccaaaatctgctcctgtgaacatagatttctcaaggggaggttctgccaaaatttcctcctgtaaccaccagctttccagggggagattctgccaaaatttcctgcactgatcatcattcttctaaggggaggttctgccgaagttttcttgtgtgacgacgacgatcagtttccagggggagattctgccaaaattttctgcactgaccatcagtcttccaggggaggttctgccaaaattttcttctctcactatcacttctccaagggccaagccctgcccaaaatttccttcatatatcacatgcatcgtagacatacagacaataaactctaatttgcaaaggtaacaaaaaaaaaaagagtgctttcctcctttgccttgatggtaggctagt

SEQ ID NO: 7709 - DNA, 809 bp, Zea mays
ttgcatgcctgcagtagaggcaagcatttttttttggcaatgttcactgtaaattttgagtagtcttgtttcttctaagtgctaccttggtgtactttagcccatgtctagttctatcgtgcttaggggtggtaatagatcgcgatccaaatgtttcttcacaaattgttagagccctatattaattttagttaaaatttgaataaaaatagagcccaattctaatcctatccgatccttaaaatttatagtgtaaattttagagcccattgtcacccttaattgtgcttaataccaaaggtaggtgtgctgggaaaaatactactcgcagattcatgatgtatcatttgctctagtcaaacaaagttctacacatgcaaatccttttctatgaagcttgttgtactcaataatggcattgatagacagcaatgcctagaaactgtctgttgataacttgcccgtaagagcttcctgccttttcaaccacagttctggtggtgctttacatagacatgaagggctctgcatgatactagtttattacaatgaaattgtttgataatgggttacaatattgttgtttatgctattatgcttatccaaattctgctcacatgacgtgttctgtcattttgaattaaccagcaatggcatcatcttcggacccatggatgaaggaatacaatgaagcatccagacttgctgatgacatcagttccatgattgccgacagagggtctcttccacaatcaggcccaaaaattatgcggcatacttcagccattcgagaaaaataactattcttg

SEQ ID NO: 7710 - DNA, 805 bp, Zea mays
ataaaggcgagagttgagttgaaaccaaaaattttggaactgtgccattataagaggtggattttgtcaatgggccttgtctagacttcgttatcagcaaagacagatttgcccctatcttatctggacagaatcccggcacggggtccgtcatgagcccaagacaagagcacggccgtttattgtcggcgcacggccgttttttgcggcatatttagcctgatgctaggtactatcggtatggatagcctatcaaaccgaaccgagcccgtccccgtcgaacctgtttgtggcccaaccttagttatgatatagtccattatatataaatatgaccgactcgatctctcaatttaaagctattttctagttctaaggggcccaacgaagaagattggagagactataattttaggatatgggacgggcttgaactggtacgatctaataaaggcatgacgtggtttagagtcggactgtatcactgttttttacacttcggactggcatagtataacccaaaacttttttgaattttctttgtctgaactcgtttagcttgaagcatgatgtgctaggtctggttcaactcaattccaagcattagtcacattaacgaagaagattggagggactataattttctttgtattcaaaaatgaatatcaagaaagttttagcccctccattcctgttttcccaaacatgtccataacatattaagtaacgtaaaataaactctaacttaattagaacacaacttcaacaatatccagttggggattgaacaaaaaagttgtcatgc

SEQ ID NO: 7711 - DNA, 820 bp, Zea mays
cttgcatgcctgcaggccccatgccgagtgccgcagaccaggtttgacctcactttggtaggtcagcgtcaggtcgccgtacgtgctgttccacggcgagtcggcgacggcgcatacacgtaaaacgtccgagaccgaccgatcgtaagtgcctgccttttccttttccttttccaaccgcggtcgacagtacaagaatccttgcacgtttccgacgctagctttgttggacggccggccggcctcgcagtcgccgtcgccgcaaccgcaaactggagttccgttcgatggtccggctagcagatcacgtacgtgcgtagccgccgaaagcgaagcagcgggcgggccagccaggaaaccaaccgtgtccgagggccagggaggaaagcacccgctgcggcatcgatgcgaacgcgggcggctagctgggaaccggatgctccctccggcgagacatcatcggacggcggaggcgaggcgggaggccagccgtgaggggatcgggtcgacgccgccccccgctgcttccttttgcagcagcgactgctctggtcggcccgggataccgtcgtctcctccatgtgcggccgacgttgggtgggtgggtgaggactgacgaggcatcgatcgctttgttgtgcgtgcctgtgggctctacagccattgacggcgcacatcagttgtgcggaaaagcaagattatcggatagacaaggtcgatcatcgtgtgactcatgcatgcatgcattgatcaaacgctaacattccaccaccggatcaccgagaagattatcggatatctattctcagtctttatcatc

SEQ ID NO: 7712 - DNA, 775 bp, Zea mays
gcttgcatgcctgcaggggtgtagtatgcaggagtcacacactggaaactgatgctcctatatagagattgcgagtagtacagcacacacccgtattgcccaaataatcccaccctcattatctgttaggacaagggtggaggctatctgaatctgctcatccctttgccttgtgagcttatggtcaacacatcctctagaggtacatttaaggttagtgctattccacatatcggcaattgttgtcgattgatccctaagaatcacataaagctcccaaaacataaggaccaaattacatggccctaaccaattgtcctcccaacatctaatttgcttgccattaccagccagccatctaaaccccattttggcaacctcaacagcccactggaaactcttccaatgaaattatgattcatattccctgaaaaaccagcagatctctatgaaagcaaccatttagtcttacagatctccttattcctttccaagacctcactcatgtgggagcctccggcactgggtctgtactttttatcatgttgtgtggttctcaatctgatcttgtgtacctttgtatactccagctttatctgatatgtacaatcttacactctcttttgattatcttgtttttatagcataatacgttatcatctaaagtgccttgtctctgaatagaaacatgtggggaaccctctcctctgtttgtgccgaaaaatgtctgtgtggacatcatatttggtgtccctactgacactccttataagtc

SEQ ID NO: 7713 - DNA, 770 bp, Zea mays
aaaagagggctcagtcaccctgctcaatgtccactatgtgatcaagaacctgaaacgattgatcaccttcttgtgggctgtgtgtttgctagaaccttttggtatcattgcttgcacagatcatactttaggttcttgctccccagcttggagaaggctgcaccatgcagtgatggcaaaggagtagcgatcagcagccctggtattgctaagaaaggttttaattctttgattacccttgggttatgggctctatggaaccacaggaatgagtgtgtctttgacaaaaaccctcctaatttaggagcagctcttagaaaatttgaggaagagaaggatctttgggagcttgctggagccaggaatctggccctcttaacgtgccctattccagggctgtagttagaagttctgtcttttagttatggactgttttttgtgtcttcatttttggccaccgtgaagtgccttccctctgtaatggtccattttggaccttttttctcttcttcttaatataatgatgtgcacttctcctacacgttaaccaactcagctagggggcctttcgcatcaaggtcattgcagagttaacaaaatcttgaatttcagattttaacttacataaagagagtaataaaatttacattcccaatatgctattgaatataaaagcttgacaacttctgttattagcatggtaatttaaatacttccaaatttaaatttagcatgaagcatggtttatttattaatgtagcggtgactag

SEQ ID NO: 7714 - DNA, 739 bp, Zea mays
gccgcccaggccgcagggggagctgcttttgccgtttcgcccgtttgtcgcgttgcggggggtgatgagcggcctcgtggtacctagagggaactcagggaaagagtgggaaggatctgcggggcccgcccggaaaagacttcctgcctcgggccttgcgctaatctcctgtctcagaatcatgcgacagacgacacttggcgtggtggcccgcaaccacctggtcctctagtctacctcatcctattcccgtctcgttttgttttctctgccatgtgattttttgaattgccatctcagcctttcgccgctccgtccgttcttcaactggttggacggtcggtcctggctcaggagtcaggaactcatcaggatgtcaggatgtgctagaccgaccgggacagccgggaagtgcagggtgcaatacaaatacaatgcacacgagagaagaagaaaaaagaatcaagaaaccgtccgctgtcaaccgcagaacggtgatggttgtcttcagaattcaaacagcaggagctcacaccaacaggcggtgtcacggcaaggtaagaacggtcccaactttgaacgacagtacgaccaggcaaaaagcacacaccgagttcaagcataagtgttccttttccagaccaccagaagaagtctggcctcatagtttagttaccatccaacccaacccaacgtgtaacgacacgtcgtccttgtacgacaaaggccagggcaggct

SEQ ID NO: 7715 - DNA, 776 bp, Zea mays
gaacagctatgggcttgcggatttacggtgtggggaatttgaaattttgggattgaaggaaggattggttgactggattacctgtacgcggaacctctcaattagcgctccgctttggctataagtttcccggtttccccatttttttagtacatggatttggagagctgagataaggaatctcaagctaattctcaagctgtggtagtagtagtacttgcgaagtaggatgaggaggacgtggcctcatggctggagcctttttgtggttatgcttattcactgcaatagttgtctgacttggattatggtagttgacctcatggctcagtcagttttggagaattgtatcagatcaacggaacccttacttctatttgtttcaagcaatagtgggaaatgatcatatactgcaagcctctttgctattgtatgatttgtgctgatttaatgtcgtctaattcaagttttgttttattggcatgtcatttattggattaaataagcctatgcactgatgcttctacctcactatggctgtttacaatgactgtgttgcttcactagaagtagagttgtctttgtctaggattccgtacatagttaacatcttgcatcatctgttttggccaggtattcctgttctcagattctaatatgtcactgttttattattacagacgcactatgtattgctcctttgctcattcaaggaacaactccagcagcatgtacgtgttcatgcaatggaagcagtgatgggttggttgggagct

SEQ ID NO: 7716 - DNA, 833 bp, Zea mays
agcttgcatgcctgcagcacgtccggtcccaatccggcggaacagacacagcctcggatcgaggcacaggcactcaccgacggcgtcgagctggtggaacgtggcggtggtggcgcggcaggtgacgccggcggccccccggcggcggaggctcagcgggcgcgaggacggcgcgaggcgcagcgagagcgcgaggctggcggtggccatggactgcggcctgcgggcgggatgacacgaacacgagtgcgcggtgaggagggttgttgaggggggacgagcgccgagcgggaatggatatagataggggcggggcggggcggggcgcgagggaggagcacgcgggcggcgggcgcgggcgagtggagtggagtggagtggagtcggggagggcgaggcgcgacacgtcgcggccaggcctggcattcaggcgtgggccccctcgtgctccgccaaagaatgggatgattaatgttgtgttgtgctgctctgcccacgaggtttgaaactgctcgcatcgcatgcttgtgccaaggtctacagctatatgttgtcacatccttctctgccatataatgacatctttggcatgacgagcagcaaacggcgtgtgtttcgcgagaaagaagacgatcgatcacgtgtgcaagtgcgccacgctagacaacagaaacggttcggcatgcacacttgagctggcacgaacgtacttggacggacgacagggaaaccgtgcacctttttaaccagttcaagtggagttggccgcgggatattcttgttttatttcctgggaccaccctaacagaaggctcaccacgggcccccactgg

SEQ ID NO: 7717 - DNA, 775 bp, Zea mays
tgatgctctattgggttcatctgcaaccaagtacagtgcattagattgccagaggcctgaactattgaataagaataaagttcaggggagaattcttttgtgtggctattcgttcaattacatttctgggacagcttcaataaagaaagtgtctcagacggccaggaatctcggagcagctggctttgttgttgctgtggagaatagttacccaggaacaaaatttgatcctgtaccagtcagcatccctggaattctcatcacagatgtcagcaaaacggaggtattatacttctagcagagccttatttcatatttgcatatggttgccacttgtagacaacatcatacatagacatatggaaaaatgagactgtatattcatgaatagatcaataaatatgcaatttagttctcgaaatagcatgaattgggcttcaaaaaacaatgtgcaaagaggtgcaagatagtggcatgaattctatatggctgctgctactgctactataggatgacagggcagaaaggtaaagtacctatgcattgtttggtccttgtatgaaattttctcttgtaattaggcacagtcctcgtgttgaaaccatgaagtaatctatcaatttccttttcatattattgttactattactaatacttcttagtacctttcatatcttctttgttggtggctcctgttgggtctatagcctaccctaacttacttgggacgaaaaggctttgctgctgttttattgagatgacattaactttggtt

SEQ ID NO: 7718 - DNA, 836 bp, Zea mays
aagggagtgaggcatcaaatccagtttctttcggcaggagctggagagcatccatggcgccctccgcaaggtggctgccgtgccaccggaccagctggatgagcaggtcaagatctgggctcgccaagtcagagaggcatcgtacgacatggaggacatcctcgactccttcctcgttcgcgtagaggggcgccctgagcccagtggtgaccaaggaaggctcaaaggcgctgtgaagaggatgggcaagctgttcgtagatgccaaggctcgccgcgacatcgcaagcgccattgaggccatcaaggggcagctacagcaggtgtccgagcggcgtgataggtgcaaagtcgatgatattgtggccaagcttgccgcaagctcaacaattgatcctcgtctcgaggccatgtacagagaggtgacacaacttgtcggcatcgacggggcaatgggtgagctgataccgatgttgtccctcacgggggatgatgtgtccaacaaggagcttaaggtagtctcggttcttggaattggaggattgggcaagaccactcttgctaaagtggtgtatgataagctcaagtcccagttcgattgtggggcttttgttcccgttggccgaaatcctgacttgaagaaagtcttcagggatatccttatggatcttgatgaacacagatacacggatctcaacatgttaatattggatgaaaggcagctcattaacaaactccgagacttcctcgagagtaacaggcaagaactctgaaaattttgctagagttaaccataaaatgccttttatgctgttgtgcatatcttattttgccagt

SEQ ID NO: 7719 - DNA, 879 bp, Zea mays
gttcttcctgtaggcagccggcggccacgtacagctagtctggccgctctctctttaaaggagcaaccaacaccaacgcgtacaaaacacacacaagcaaaggcaaggagttgccagagctagcacagagcgtagctgcctggaatcggaacagtgctgggtagctccagtccagtcagggtcactctggtcatcatacaactccaactccaagcagctatctactctagctagctagctagcttggaggttttgctcatgcacaaatacaatgtgtcaaacatgcatgcactataccactattattcttctaacacatcagtggccggctcagtgtattaatagctaccctgtagtactctcacatgattattattatgccaccaaacactgcatatacttatatagatgataggtactattttatagctggttatatataataacttattctacgactatattgagttaagatggttattatattaatttatgaaattacattaagtttcttcgttctatacgtgatttacttataaagtttattataagtaacatatgtattatatacttatatattgagtttattaccttaaattaatttggctgtataataagttattgcatggctagccataaattaatacgaaagaaaaaaaacagcatgtgatataacatcgagatcatcaaatgtcatcgagaacgaacttttgtatgttctcgacctgcatgttatttagtagtacaaggatcagcgtgatatatgaatttgttagcaagatgtatagaaactgcatgcgcagtaacagctagaaaactaacatacattcttaatttctcgtttaatttctaacaagcaaattaacaatctgtgtgtgc

SEQ ID NO: 7720 - DNA, 827 bp, Zea mays
ggtggagatagatatctatccctccgtcacccctgggctagcggcgcctagcatatccaatatcatatcataataactataaacttggtcggtcgtatatatgcatgatcgatatatgctcacaaatctagctagacagatgcatgcatgcatggtctacaatattcttctatctctagatcgagactactacgctacataggaatttcatgtactccctacttaacagtttataatttgtttaactttttcgaactaaatttgatcagttcgttttattcaaatcttttgtgaaaaaaatgaaaaaattcaaagacacacataaagtatattatatgctaaacaatataaaaaaaacataatacccaagtatccaattatatcctaactaattttcgctggctaattatttacgggttaattattaggcaccgacgaggatccaaacatggctcgatcaactcagtacgtactcacaacgacgcgttgactacctgagagcacttacttaattcgcgtcagcaaatcaagcgtactagcccacacgcagcaggcttgtctcatccgaatatctcacatggattcttaattaatcttatcgacatggacacttgccagttgctaagcattgccttgcctcctaacttcccggctaaccaccaccaccaccacgtcgccggcgagccaaaccctgctcgacacttgcgcaagccgccggccatgcaccggttgaccgcgaccggatcaggctttgcgcgttgcaacgactcgttcagtcaccggtcactatctaccttgtcagatgtcaggtcagtcggcagagtaca

SEQ ID NO: 7721 - DNA, 789 bp, Zea mays
agccggtgtcacggagtgccctgatggcccagatcaacaccaaagtcggcgacagctttgtccggtcgctggagtccgacagcgacgggtccgaaaccgtggaagcggaagagaagcctgcgaggaaccgtgtggcgaggttccttgtgcttggaggggcagttgctctggcctgtactcttgaccaagggctcctgacgaaggctctcatcttcggcgtcgcgcggaaattcgtcgggcagaggaagacactgtagcatctctggcatttatttctcagcgtcgtccgcttggcccgtggtccgcactaaccggacctgtcctttcactgtcgtagagtggaggatagaggtggttcagtgtctgcctaattggggcaaatgccattgaccattgtggctgaaagagaacagagctgatgaaaaacattttggtgtacagatatgctgccggctgttggatagcgaggaatggggaatagagcaaacaatgtacttctcgtttggagaacggaactcctacgatatatataaatgtgtttcatctaatcttgtatctcagacaagaacagatcagatgactgtgcagatgagaacaagcatttttctatgtagcttactgcggctacggcttctacaatattttgtttctatggattgcaggattgcagccgcagccacttgcagccgcagcagtggctgtcagccaactgaacaataatttgaatctagaatttgaattccattctatatatgacgacgctcgaattttttaatctagaatttgaat

SEQ ID NO: 7722 - DNA, 850 bp, Zea mays
gccatccagatgggataacccaaaacttttctttgcctcacacggcacaaacttctatgctccagctgctgctgcgcgctcgtctgtcaccaaacctcatgaaacagctgactactgggaccaaccaaaccgtgcgtcgctatcgctacacaccacacccattggcacgtccgggccacatgtcacccctccgcccggcgtgacggcgtcgccgtccagaaccaaacggccagtgctctgggcacacacggccccctgcatgcgcgccacctcatacgcccgcagccgtccgttcgcctccgctccacgcgtggcccgcctgcatgatcggccgcaccctataaagtccaccgcccacgcgtggtcgtcgttgacacacctcccgagccccgcccgccgcgcgccccccctgcaccggtgcgcggtgcgccctgctgcccgattcgtcggggggcgcgggaatggagctggagctggaggcggcggcccggcgcttccacctctggttccgcgggctgcgctcgctgcgccgggacctggcgtcggcccggtggtcggacgacccgacggcccagctccccgcgcaggtgggccgcttcgtggcccacctggagtcgtactgtgccgcgcgcgccgggctggacccggtgtggacgctgtcggcgccgtgggccacccccgcggagcgcggcgccgcgtactggctcgccgggtggcgccccaccacgctggtccacctgctgtacaccgagtccgggcgccgcctcgaggcgcagctgccggacctcctcctcggcgtgcggtcggggaaccttggcgacctcacccccgcgcagctggcgcaggtcga

SEQ ID NO: 7723 - DNA, 841 bp, Zea mays
aactccttaattgctgcatggtctgaaaatgtcacgggcgtttcttcctcaaccggatctctctcataaaacagtttaatatgcatcctttcaacgacatcgcttggaggatcctcaggtatatcacgatacaaatgtttgagaatgaagagagcagtgtcatgatctcgccaatagttgctacaggatatccacaggtcagtgacaatctgaaactcgattaaatcaacaggaaaggcttttaaaactcacgtatgagctcccagagcagataggtatgaatgctgaaatgttttctcctgcaaaaatagaattgatatataagatttctaggataaaaaatttactcactgaacgtaaaagcatgcaggaacagccaagcaaaaaatttaagaacataatggagcgaaattttatcacctgaagcacatgatcaattcgaccatctggtgagccggtcaacctttccatcataatggaaccatacgatcttccttcctcattagcactctcaccatcctctagatcaataaagatcatcattctgtcagaattggatctctttctttccacgtaatttacaatgtaaatttacagtgtatacaaaagataaataaacatatataccttctgtgtcatttctgctcaatgctagcaaagcagctactgctttgacctatagaagattaaaaaatgaaggggtgaaattacatatttactaaggctatattaacagtgttcacttctagatcattcacaagcataacacatactgtttaatatattaaaaccacgagaatcacatcactgtttgttaacagcccgcactaaattcacataa

SEQ ID NO: 7724 - DNA, 787 bp, Zea mays
cctcctcggctgcggcacgcagggcctcgtcttcccgcgcgacctcaacgtcttctacgaccgcttctccgagtccatgccccagccctacacccgcgcccagctctcggagaagctccgccgcctcaagaacaagttccgcagcatgtccgcgcgcgtcgcgggaggcatagacccggcccgcctcgcgccgcacgaccgcgacgtgctccacctctgctccaggctgtgggaccccgccaacgccgccacctcgcccttcgcggccagcgccggaacgtcggggaacaagcgccgccgctccaacccgcgtggcacgccgctccctcccccagacgcgtctggggatagcaactcccatgactacaatgggattagctcctctgctcccggtttgtttccggatggttccaacggcgaggatacgttttaccttgagcaagaaagcgggcagctgggcaatcatgaaggcgctgctcttgtagcagatagcaaattcgatgttgtggtgcaggagcagcctgaggccgtggttactctcccgaatgggaacaacggaattggcagtgagatgagtgcggagtgtaaaacggtggtgccgtgcagcaacgagcaccgaatggcaaatgctgtcctagatgtgtttgaggaatgcctgagggaggcaaagagtaacgggattatcaatggtggcaatgtggagagcgagctctccaagcggtggagagcacagaggatggatgagcttgatgtcttgagccggaggctgaggttgctcgtcgagtat

SEQ ID NO: 7725 - DNA, 853 bp, Zea mays
aagtagatttaaaaaagaagtcatgtgtgatttcaaaatcttcttgggatcacccaaaagaggaagctaggagagcttgttccaaaactgcttgtcaagtaatatatcactaacactaatttcttcatgattaaaatatgactcaagcggcttgcttcggtgttcacatcactatttttgaaattggctggctgcctggctacatgcaaatccacacagcctatgcatatgtgcacggatctaactagtactccctgcgttccaaattgtaagtcgttctggcttttctagttatctaacttttgctacgcatctagacatacattacgtctggatacatagtaaaagttatgtatctaaaaaagctagaatgacttataattttgaacggaaagggtatatgtaattattgcattccacgcccttaaaataacagtttaccacttcaatgaagatatatacaggataagttaaagaaaatctacagctcaaatgaactttcaagatcaaagaagttccaactggctgctggcgggcatgtacaatgggtgtcttaagttgtgtcttagagtgtgtctatgggggtgaatgtaaaaaaactcaagacatgtatcttgacgaagacacagtgtcttagctctatgttcgagacaggagactagctgattggtcactttaatttattgaatgatctgattggtacaatgaatatggtaagacacatgttttagatatgaccactgtattatgttgtgttttagttgtgtcttatacttagagtaccgtgcagcagtgtctaggttgtacatgccctaataaatcaaggagtacatgcactgcaggcatgcaagat

SEQ ID NO: 7726 - DNA, 813 bp, Zea mays
catcatgcgcatgtggccatgtgggggttgtcatgcatgccggcggctaatcatggagtggctggcctcgtcagcacttgagtgactgggtctcccgtctcctcccggctcccgctacggacggagaggagtactcctgcgcatccagctgcacaatcggctgaggtcgcgtgcttttttgcgtgactggcacacacacctttcttccctcggctgctgggctgggctggccattctgtaggctatccaatgggaccgtcgtcaacttccgggcctgcatcgatttcgctcgccacaacatatgctctgccctaaaccctactctcttatgcactactgcacctcggattccgttccattccatctgctgatgcgctgctgactctgactcaagtggtccagctgcatggccctcgctacagaaccgcccttgacttgtggtcgagaccgagaccccgaccaggaaggaaggaagccttgtcctgtgtagtgtgtcctaccgaaaattctactactagtacgaacattgagtacgaggctacgaccaaaggccgtcgctgtccatctgggcccgcttcgcaaggacgcgcgcgtgcccgagcggcccactggcaccacgtactctaccaccggcaggcgtcagcctaaaaaccccgcatgaatcatgccttgcccggccgtgcggaaccgggcccgaagaagaataacatgccgtgctggcccaggccacgacgcgcgcacatgggcgcccaccgcgtcgccgggccgtaggtgcaaactggaaaggggtactaggaactgcaggcatgcaag

SEQ ID NO: 7727 - DNA, 874 bp, Zea mays
ggacttgcagagtaatattcccttgaataattgtgagaagtattggtttggcgcttatagacaaataaagtccatctcgtaagtatgctttgttctgtgtctacatttattcttttttacatgtgtagttgtgtccatattttgcagattgagtagctgagaatattgtgacaacgtgtcattccatgcatcaccctgtttccatcttttgtattatataaaactaagttgaaatcaatgcaaccaactgattaactttaccaatcttcattgatccagatcgctgtcaagaggttgaagagtgcaaagaatggcacagaagcagaatttgcttcagaagtcgagatattgggaagaataagacacaaaaacctcctgagttttcgtggatattgtgcggatggacccgaacggattctggtgtatgactttatggcaaactcaagtctctatgcacatcttcatggaccacattctgctgagtgtctccttgactggcggaggagaatatctattgccatcaacactgctcgggctctcttgtcagtgaacgacctctttatctttgttcataaccgaaaaacattgataattcatacattgttgcttttgttaaacactgaccgctataactcaagtactttctcacaggtaccttcaccactatgcaacacctaagataatccatggaagcatcaagaccaccaatgtgttactggattcagacttccaggcacatgttggcgatttcggtctgataaggtttattcctgatggaatggatcatgaaaagattaccagcgaaagccaacgaggctatcttgctcctgagtacattatgttcggccaaccagctgaaggttgactgaaagga

SEQ ID NO: 7728 - DNA, 891 bp, Zea mays
agtaaccttgttcttaggcattgtgaaaaaaaatcggtacaatgcttaataggcaaacccattacccatctattaggtatgatatatgaaatgttatgtatctacatttatttctttttatatgtagttttgtctatattatgcaaattgagtggttgggaatattgtgacaacgtgtcattccatgcgtcattgtccgtatccagctttgtatattatataaaaagaactaggttgaactcaatgcagcctattggctgacttcacaaaacccttcattgatgcagattgctgtcaagaggttaaataacgcaaagaacggcacagaagcggaattcgcttcagaagtcgagatactgggaaggataagacacaaaaacctcctgagcttccgtggatactgtgcggacggacccgagcgcgttctggtgtatgacttcatggcaaactcaagcctgtatgcgcatctccatggaccgcattccgcggagtgtctcctcgactggcggaggcgagcgtctatcgccatgggcaccgctcgggctctcttgtcagtgaacaacaactaaccgttatctatttatctttgttcgtagcagaataacattgataatccacgcgctgttgatctaaataactcaagtactttctcataggtaccttcatcgccacgcaacgcctaagataatccacggaagcgtcaaggccaccaacgtgctgctggattcagacttccgggcgcacgctggcgatttcggtctggcaaggcttattcccgacgacggaacggaccacgcaaagatagccagcagcgagagccagcgaggctaccttgctcccgagtacgccgccatgttcggcaaaccaactacaggtcgacactggaggatc

SEQ ID NO: 7729 - DNA, 836 bp, Zea mays
ttgatctaggcatagtatacaagttatgcgccaacggggacaactcttccctcttcctagaacctggcatggatgtaagaaaccaaatgcttgtgcaaatcaaagtacttggtcaagtcttctgttctaaggcccaggccccagggttttagtgctgaggaggtatacggcatttttgaccaagtgggtgaaatattgctgcttccagagtacagagtgtggtcatgcaaacaagaagctaggtagaccatggtgtgacactgatctaatgtttgaagcaattctgtcatggagagacaatggtgtcactgtcaccccaatcaaatgtgagttgcaactcgagccatacatggcgagacaatgggattctggaatttctgggctccagtgatggagatgccaactcatggtcatgtcgtggggacaggcaacgttgtggcctgtgggggtggaaatgtcgtcagcagccaccagaaatttaaatgtgagagcatcttcatcttcctcatgtcacagccttcaccaccggtggccacggagtgtgacactaaaaagtctgaagcaaacagcaaggatacagcccaaaatagaaagcccaagtgcccaacaaaccacgccaacattgtctgcctagcagaagccttgcccaaaatggaaagaccaacatgaatcttattccaattcccaataggcctgctttgccaatagagaatcatctgacaaagatggccccctcagccatccatgtggctctgtacccctcaacctcaactcccgttgatggcggcctgaccagtgaagaatgcccagctgcacccaaggttgtctctttcacc

SEQ ID NO: 7730 - DNA, 873 bp, Zea mays
tgaccaatgtccaaggactataccggctaaatatgaattaagttcagaagagtcagattccacaggcagtcatttggtgtttgacagtggcaagaattatctggagttgaacaatcattctgtcacagatttggaaaggatttacaatggacatgccacgtctgtagatcaatatgttcggggaaatggggagacattagctgaccatccaaaaaaagaggaagctggcctccaaaaggacactggcaccatagctcaacatcgtgatacccttgcttgtgatggggagtctgtgtgttcgagttgtgaagagccgagacgtggattaaatggcgagccatcagacttcagctcggagtcacactcgagactgaccccaacacataacacaggtggcaaattgtcgatggtttctgaacatccagtgcataatatggagtcagatatgactgggatggcaagtgatagcactaacccggagctgaatcctgaagccagcaccaggaacgaaatggtgcctcctgaaattctcgagtccagcttgtgtcactcttataactatgcttcctgcacacaaaaaagccttcttaacgctcctctgtcatgcaggacggctcccgatccactgataacccagtggaaccagaaaacgtagctcaggacagcgccactcgaggaaggcctgaaggcgacgcccccagatcagggaaaggggttctgaggtcggtcgctggaggaatcacccttgtcggcgcagtgttcttcatgttccatctcaggtgcggtaccatgcttgttagcactgctttccagattttcgctgcgaagtcacactgatacatcctctgagataatatccttcagtgccgcgct

SEQ ID NO: 7731 - DNA, 838 bp, Zea mays
tgtgtttcaagttccaatttatggaagacagtgaatcaattatcatgggttataccatataccaatataaattatgaaagcttcatggcgcaattagtctctgttacctaattgaatcggtttgtattttttttgtttcattaagtttgtgcaaattctgttgtatctgttcagttttctaatgtttctttgctgaaaagtatagtgtgtctttattgattcagtttttatgtcgtattattaccaccttctgcttcatttgttttgttgttctttctctctttattttcctgggaacggtttgatgtagatcctgcatttgaatacgtataggttggtgttcctatgtttatgtttcgtcaaatatatattgcttcgattccttttgtgggccttgtttaaggggaatgaccttgcaaaggctatctattctattactcatcatcttgcctttctggccacaattgcaactggtgcttttaagagaatggacacgtatagaattcaatacctctattacaataccatctttttattctggtcatgttatttctttctcggagccaaactttgtttgcagattatgacctatttatttaaaatttgtttatctggagaatgaagatgattaaataatcgtttggtttggtcaattaatatgcatagcaatagaatgtgccattcatgttattgttgataataactctccttcaacacagtgatgcaatgcgcacaaaggagactcttaagattctgcaagagcatgtccatggattgtctgaagcagtagtgcactttatcccaagtttctactcaattgcggcaatggatggcctct

SEQ ID NO: 7732 - DNA, 867 bp, Zea mays
gggtacccggttgagcctctagtgtcgacctgcaggacttgaacgttccccagcgccttctcgccgtcgtcgatgagtagcttctttcggagggccagcagctcctccccggcaccgcagatgtaggccgacgttcgcctgccggagagagttgctccttccatgctgtcaatgtagtcctgcatgtacagcacaaataagaccaatgtaccatgtcctaccgatgtttgcatgttgcaagataggaggaaaaaaaacattccaaggtgttcagacgccatgaaattgaaatgaaattgaaatggttgtttctgatggttttctgagccattggttaaaacaaactcaaggcattcagacattagttttctgggcctgttgatggctgtagctaggtcgatgtttttgatgtacaacaatacctgtttcgtgtaagatccagagaggaagaagtttttaacgggcgtcttctgatcaggcctgaatgggtcgtttccaggagcctcacggtacagcgattgtccgatctttaccacactggaccatgtaacttccaagccccgggaagatgggaacagttctacaacctgtgggaaaattacatgtgtttattactgatgtgagctttggaagaatacaaaataacataagcagaagaaatctctctctttttaagtgcattgaaatggggtcttgctcagctatgtgtaaagggaacagcagaaatttgaccgaaacagaagctatttacaaacctacctgcttttgaaccttactaatgatctcctcgtttggcaatggcatgtatggatctacaggagtcagggcagctgtgcagatgcaagcaaatcaaatttttttcttttc

SEQ ID NO: 7733 - DNA, 801 bp, Zea mays
aacagcagatttcacatcctcagaattagtagaggctgacggacgtccagcaatggtagttatttcatgagaacttagtttcatcgcctgcacattgctgcgtcgctcaaactctgacttcattgacatttctctaactgctgccggtacaggaggtaatttaaattctttacgctggctcgctgatgaactggttgacaatgcccccaacctgttgacatcaattggggtagagcatgatttacgcgaagaacctgttgcattaatgaacagggcatgaattgacaggtaaataagctgagtaagaattcctctctgtctattttttttgtgtgtgcgaaagcatccatgcaagagagaaattggatgagctagaaaaaaaaacacaaaagcagctttgttttcttttgtagcacctgataaatcactcatattcagactcagcagtggattgccatcatatgatgattctgggtcttcgcttccacgacaagcacagcaacacagacatataagagccaccaatgcaacacaagccactgacaaaccagcaataatagtgccactgttgtccttgctcttgtgtttgggctctggtttaccagactttttcacagtagcaactagcaggtgagcctctccttcggaagacaaaacgcttcttattgcctgttttgctttaggtcggggtggagcaatggctgaatcttcttcatgtagacgtcttcttttcatcgcaaaaggaaggttactgatgctgttagagttgggaagtaagcttatggtttcctcctgatgctt

SEQ ID NO: 7734 - DNA, 820 bp, Zea mays
gatcctctattgtcgacctgcagctgtggaaagggaatgatagtgtgttaaagaatcatatgcgccggccgtttccatactcggccttcaattcacgcagcagaacaaaaggcagccgccagaatcacgtcgaaaggtactcagcttttttttgttaatcctgatcacggattcaaaacgcgtggccgatcgcccccatgcccaagcgggcagcaggcagtaggcaggaacccatccatctggccgtcacaggacgggaggacgagcagcagaggctgccccagtccatgactccattcgtcagttcagtgagttaccaccagtatggaagctgaaaagggtatccgcctaaagtgcccagatccgcatgactgcaaagctgtaccagaacagctacagaagctgccatctcgtcgtgtatggctcgcggattatttctttcagatcacgggggcacatcacatgtatacgtgcatacgttggcgttgtattattcaacatgtccagtcgttatcatccatccatattctatacatctatctatacctcacatctaacgcacgcaacctttgtatataggcaagtatggaacggtaaaggtgagagcaccctggagtagctacagttattcctgttgagaattcccagcttgaattctggcaccgggctgaaatataactgaacagctgttgcatcaatcacgcgggccgtcaaatgactgggatttcctcaagttccagtggagaccctcatggatgctgcggaggaaatcggtcgtcgagtccaccaggcaggctgtgggcacgggccagggagaaat

SEQ ID NO: 7735 - DNA, 891 bp, Zea mays
atggtaagtcatcagaaggggccggctcttcggaagacgacgacatggatccgagcggccgcgagaacgagccgccggagatcgacccgcgcgcggaggacaaggagctcaagtaccagctcctgaagaagtacagcgggtacctgagcagcctgaggcaggagttctccaagaagaagaagaaagggaagctgccgaaggaggccaggcagaagctcctccactggtgggagctgcactacaagtggccgtacccttcggtgagagactaatctcccgtgcggccgtgccttaacacaatgctgacagatcgattaccgtactcatacagcacgcgcgtgccttgtgcccttggctcgctgtgcttgtgtttgtctgaacatgcaggagacggagaagatcgcgctggcagaggcgactggcctggaccagaagcagatcaacaactggttcatcaaccagcggaagcggcactggaagccgtcggaggacatgccattcgtcatgatggaaggcttccacccgcagaccgcggccgcgctgtacctggacggcggcgcgttcatggccgacggcatgacgacgtatcgcctcggttcatgaaccgccgtggacaatccaaaaccaccgggcgaccgtgtcggagtgtttctgcgtaccaggaagatgcgatgcgagggacgttgttaattatgggggggttttgctgccggtttccgcgctgatcgccaccaaccaaggcggccggggtgcggtcagtgatctagtggcgctcgatctaagttgtctgtggcttctgtaatgttgttgttgatttcggcttgtaatctagctaggtattgtttcgaacttgagttgaaagtctgcaagtatccgcaggcaacaagcaac

SEQ ID NO: 7736 - DNA, 855 bp, Zea mays
agatatgttataggtacgtgaaaataagtggcatagttaattaggcgtccttaacaagctcgtacaccaaatcaccagcataacaacaaaacttccaaggaggaaagggagtgcatacctttgatggttcggaaatcaacattgaacttcattgccgatcgtggatcattaggggtgaaggtgaacctatcaccgttctgtaattagaaggacaacgaaccgatcatatttggacccgacaggatattgctgagcaaggaaacgaagccagacgcaaatattgaacagcaaactaaatggtgaccatccatacatgaaaatactcaaattagcttggctcatgctccagcatccgaacctccaggatgcggagggtaacccacaaagctaccccgtgcccctggctcggatttgctaccgctgatggccacaaacccgcgcgcgcctccacttccaccgatccaatcagcggctagtctccacggctccctcgattcaatttgccgcgcgccccagaaaccgccgaccaaaaaccctcacccgcaacagtggcgcaggctgcgcagcccggagcttgttagcggaccgtgcgcactcgtcgggaggaaggtgaagggagagagagccgcagggagtgagagagaaggggagggtggcacgcaccatgcggaggatgcccggggtgccggggtccttgatcgtggtcttgtacttggcaccgatcgtcatggaccccatcgctgcaaccgccgccgcggtggctcgcctcgcctctcggtctcgctcgccggcgtcggagcaaaagccgaaggtgcggagaaaagggctgaggcagcaagcctacaagtagaagca

SEQ ID NO: 7737 - DNA, 833 bp, Zea mays
tttgcatgcctgcagtgaaagtgctcttagactgactccagcagtgggcagctattttgcccagctatacctgtcactgccacctccgttttagctggcctccttggttagacaatctatgttatgtatttttcctctctttttttattgggctaaacgccttgtaatctgcacacacacatatatctcctttacgaaaaaaaatatatataaagcaggtttcttctcgactccaaaagatagatcaagtataaaaaaagcaatcattatttgtctgcatggttctaaatcttccgttatagccatcacaatctctagatatagctatttataaagagtaaagctattatctacctcccccgttccagtttataattcatttgatttttttactctaaatttagcagactcattttattagtttttattactaatttttactgtaatattgtttagtatatgatatacttttaagtatggctgaatttttattttttttaaaaaaaaaattgaatacgacaagtcgatcgaactcggtaaaaaatcaaacgaattataaattaggataaatggagtactatatataatttaacggctatagtccaaattaggccactattagctgattgagaaaggtgatcctaaaagtcttaggccacttattacaactctaccaagccgtctttacctttctagcacccctagttatgggtaccctaggcaccacaagaaaatagatgtgcacaaagaagataggttctaaggtcccaccctcgaggtggtttaagatgacaagactccactgcaggtcgaaactagagaaaacgccgggt

SEQ ID NO: 7738 - DNA, 787 bp, Zea mays
ttgcatgcctgcagtacttgaggagttctgtcatttaaggcttgaattctattgtaagagaaaggtatatgtgataaactttaaaattttcagaatattaactgagccatattaactaatttatttttcgcaggaagcattgttgaaaagcatcaagttggacttaaagaagcttgaaaacaaagttaggtttatccgctgtgttgttgataatgaaattatagttaacaaccggaaaagggcagatctatttttggagcttcggcagaagaattttgatcctttcccaaagaaaaaaaagagggctgaaccagctgctgtaggtgctttagaagaggaggaaaatgaagagagtcctgaagctgctggagcggaacctagtgactatgagtatctcctctcaatgtcaattggtacgttgactttggaaaagatacaggagcttaatgctgagaaacaaaaattagtggatgatgttgaggaattggagaatatgtcaccaaaatcactatggttgaaagatcttgatgcttttgagaaagaactggatgtaagcaatgccattttgtgctgttatgctagcttccgtgttctgctacttcacttaatcacttgccaactttgatgcaggtgcttgatcaaatggatctagcagaggaactgcaaagggaaaagaggataaatgctggcaaaaaaggaggatcaaaagctgcacccaagaaaccacgtaaaaaggctgcatctaaaaagctggatagcgatacagaaggtgcctgttattcctctt

SEQ ID NO: 7739 - DNA, 809 bp, Zea mays
tcctctagtgtcgacctgcagtagaatactcgtggagaacatgaacgcgagtgcagcaagcctgcaacaggagaaatcagtcgaacaaaactagaaagccaaagttagaaaatactgaggacaatgagcttacactgtagagagaaacatcagcagtacgtgagcagcagcatccagcacagcggcacggagggcaagcagacaagtaacagataaacagaatcagtaaaaggaactcctgaagctatttgaagaagaaaggtattggtagtctaatacggtacgagccaatcggagcactttaatctaaacataatctctttcggaaaaaatgaactcgtcaaaacagaaggtgaaaatcacgacgaaagcactatgagctaactgcgtgcatttcacgaggtttttgcagaaatcggattcaaaaactgctgcaaagtggcaacacaagctccacctctgatccaaaatgagcacctgcaaaccaacctcgaccgaacgagcaatccagtgctggcgctggcgctgccagaggtaacttacagcgcaccatccttttccatccataatctaattgggatctccaaagccctgattccgaagagagcaaccgagtccatccatcggactggaacggaaccctagcaacaacccaatcggcctgactccatgcacgaatcggcgtcccaaacgacgggaatcgaagctggactacaggaaaatgttggaagttcggggggagaagggtctaggcgcactcaccttcgacggtcatcgccatcttcgcctttcctctgcaggcatgcaag

SEQ ID NO: 7740 - DNA, 777 bp, Zea mays
atgcttcttgcgctcctgagctgaaatccagggcaatcctaaacacccctatcatgacccatttctctctcctcttaaaaaagttatcatgtcaaagaaacttatacatctctgtaacagtctgttaaagaaaaataaagtcacattagccttggcatcggggctggccgcttcagcttcagttttccaatcacgtaaaaacgatcgagacatgggatccgaccgagataccgggatggaatgtagtcaatggaaaattctagcgatttcagcgggaaccggaagtaattatagccacgtatcatagtttcatgagagcacgcaaatcctacatagcttttgtctttaccatcgtataacaaatatgtacttatacatacagtcttcgaaatttaccgtgggatacatggatggtgtgtatgtatggacgcctttgtaagttacaatcacctaatctaaagttctaaacacacggcaccggggaatcgcctccctagccactgctgacggagcaaaaaatgatgcgcaacgccaacatccatgcgcaacagtcggcagaatccaaaaccatgctgcattatccgctcactgctgcttcatcattcatgtgaagtataatacccatgggccatgtcccaacatgcagtgcaaggttaactgctagctatcaaaattattttgacatacatgctgctacgtgtctattcaataactaggttgtacaagaagaggacgttccagatgtatattacccccgagcattttgccgttcagcaa

SEQ ID NO: 7741 - DNA, 867 bp, Zea mays
atatcgatatggtattagaacttccatgtcgaaattcactagatgtatattgtatacctctaccttgaatcaactatgaggacattttcaacgatgattgcttactctaaaataatatggaggtggctctttgtcttcagtgatcccagatacttgacaatatttttgtgattaagattctgtacaaaaaacaaaagatttggagttctgcataagtgcataaaacaaccaagttcctgctttcaatttcaaaaacaataaaagctactaaaaccaactgaaagaataaatagttttagctttcccaccagactagttactatttccaaattttattgcctcttatatttacttgtttagggagagactgagtatgatggaccaaatgatcaaaaaacgaaataaaagcacctcaaagtgtataacagtatatactagaccaaagtgttagtattgtttacgtctctgtgtatacctccattgtaatgggccttggcccacaacactcagctatatatattcactcccaaccctgattagggttagggttgtattctccaactcaaataaaggagttagttcgatctatatgaattttcataagccacagaaactccctacacactggtagagcatgcaaatataataaaagttctgattaaaaggaaataacatatgtctatttgtgtaagttaacagggaaaaaatagagatgtgattatagttgcataatataaaaacaacaaaacatactttcaaaaggtcgatctcttgctgcatacaccataccagaaaagcattgtgcagaatcgttaaacatgcaccaaagacaattaattagaaccctaggctgcaggcatgcaagat

SEQ ID NO: 7742 - DNA, 866 bp, Zea mays
gtgaaaataccagccctggaatctctctctcctgaaattataattggaagtattaatcttaattaacattcacgtaaaaacttatcaattagttcatcttcatcctgaaaatgttgtcgccttgcccccaggtaaacccattttgatctagttataatatcacattgtcacctacactacacataggacatgaaggatgaaaaaagaacagcacatcagtcatcacagaattctagggaatggtctcttcactagaaatttttctgccctaaggagataagcataatatgttactatgaactcatgaagcatatatgaaatgtggtacatccaatcaaatcagcggagtaaatttgaggatccaaatgtgaaagagcctctagttgagtagtttagacggccttagtaacacacctcaggtccacctgtgtttgacttcctgtgggagcgaattttcatgttagaattagaaaaatcccctcgcttgtctcgcatcaaagcacaagtttaaggtttggccccagacgtggttgttctcatatgggctacagtgttgttgggtatggatagagcaggagcttaggggttttcttaacctgtgtaaggtcttcttcttaatgcaatgctcggaggctgtcgtacccccatatatcgagtcttttttagtttgaggatccatatgcatagcattcaaagtaggaaaatcagttgatggcataaatttaagacagacaagaagcaaacagtagaaaaggaacaagaaatacttttttatgaaacaatttgaagcattgagggttgaaatcccaactagcctacttcatatgcacaccaaaactcacttcaacaagacaacaagaagaatt

SEQ ID NO: 7743 - DNA, 830 bp, Zea mays
atctctagagtcgacctgcagaacagagcataatatctgcaaaataaaaaaaataaaaaaacaaaataaacaacttctatggtgtaaaggggcaggaaaaatgtttgtaaaaccacagtgaaacatcatacacgatttctgggaatttcaaggagttccatcagcgggaggaaaccattttgtgccatataaatatgtttttgctcagggcggtaactgaaaattgatagaagcttttggcatgccaacagtattacatcttcactttcccctggtctcagttgtgctactattttgttgtattccacagactacaaaaatagagaacaaaaggtatgtcaaggccaaaccctagcaattatatattaagaagatagagaaaaaaggtctaaagcagaccatacatcagaaggcctccttacggatgccagtagatagcatacaagaaaatattcatcaaacaaaaaccaaagaaccaccctagggaacagctgaataggcagccagagaacataagccctttgacccagctgtttcccaacgacttctctcctcatccgccaaagcaaggattgaggtgacgcttggagacattccatcaaagacacatctattctgatgggtccatataatccaagcacccaggatgaaaagggagtcaaggccttttctagtaagacccgaaaccacatctgacacttcctcccaccaccttagcatggaggtggcagctggctgaggggcaagggagtgcagcccaaatttccggagaagctgataccagaagattcttgagaaggagcaagccacaagaagatggtccaaagttt

SEQ ID NO: 7744 - DNA, 843 bp, Zea mays
tgaaatgtcactggatttcaactccaaatctgtagctggcttcatgaactcaatatctgcatcaacctcatgaacaaatgcatccagaagaacctcctttggaacatcaacacccgaattcaacttgttcttcttcttaaagtgtagcgacatgtggcctcccaatgcatgtcctgacctcagtaactttctacagaccttgcactggtgcttcttgatgttcattgcagctgaaaggtcactggacttcaactcctcaactgaaatgtcagtccctggcttgataaactcagcatctacatccatcccatgatcaaacacatcaagcagcacttcttttttgggagcatcagtgaccaaattcaaactgctttccttctcacagtgtaacctaatgtggcatcccaatgcataccttgaacttaataactttctgcacaccttgcactggtacctcttgatgttcgtttcagctgaaagttcactggacttcaactcctcaactgaaatgccatcccctggcttcatgaactcagcatctacatccatctcataatcaaacacatccaacagcacttccttcttgggatcatcagcagccaaattcaaactgttttccttttccttctcacagtattcatcaaaaccctcataagctggattcttgtcagattgcagccttgcactgtttgtggactcgtcagattgaaccagctgatcaaaagcattcagatttatctccttcgacaccatgggtgttgaaatgttgcgatccttatctcccccacagcaatcctcataagcagaagtcttgtcagaatgctctgccagcatcaagagagc

SEQ ID NO: 7745 - DNA, 882 bp, Zea mays
agcaagacgacgagtcagtaactcagaggtatcctagcgaaacattcagacgaattctttcagacaaagctgcactgcaacgaggctgaacaacatagaccagcaaatctgccaaattagtacacacgcacgcacgcagcgtcacccaaggattgggaaaccatatctcgaatctcgtggagattctgtcagtacacacactcgctatagtgcgccccgagaacgaaggaacggagggccaaaaagaaaaagaaagagagaggcactcgcaccacggcggcgccgccccactggtgctggtgctgctgccgttgccgcgcaatctgagcgactccaggacacgtttttcacctgtcaggacctcgaccagcccttagcgatccaccaaacaaagagaggatatatgagacggatcgcactacacaacgattttgcaatggcgacgactatgagagtgctgacagattaccgttggtgtagtcccggcagtcgtgctccccgaccaccaggccggtcgtccaccgctcgctgaaccttgtggcggcaccgacggcgtcgcagcagtgccccacgagccagcaccgcccgtccgggaccctccgcagcgttcttctgcgaaccacgcctgaacattgcagttgttacttgcagacaaataaatcgtcggcggcatggcactgccactggcagtggcaggacaggctctcgccagcacgagtcaatcagtcagtcagtcgggaaggccggccaaagttttaccagggatctctctccgcgacagcaccgcgagcgcggcgaggacgtcctccgggtcccgcggctggaaatcgaagaccagcgcctgggccagcgccgggtcgggacggaggagcaccatgaagt

SEQ ID NO: 7746 - DNA, 789 bp, Zea mays
tagcaagcactctgcactaggaacattgcatttgcctaaaccaggctcaggccagagcaagtcctctcttgcttttagctgttcagaatttagatgactgaggtggtcagtggtcaccgctgtttatgcaaaaggtttgcgctggggcactatttatgcctacactggttcatagtaaatcatactaacagtacttgaaattgtccgggtggcgcagttggttatcaccttagtctgacatactaacagtacttcatggtgctaagaggttaactttagttttgattttgagtacaccattgtggatttatttgcaagtttttttgtttatctttctgtgtaacaccgaatcaacatgtgatgcgatatggcactatgattaatttttgtcgaagtgcttgctgtccagtgtgccctaaagacaaccaaactacttcattgacattttagtgatgcctgaagtttgctcttcctcctaccatctgagttgcatatgcacttcttgcaatcctggcaatcaaatagatagctctggcggtgccacagtttttgccagtgaatgtttaattaggaagtgctttgatgctatccaacacagttttttgaaatattcatcttttataatagtatctttcaacacaatgggctccacttgtgtcccattccaaactttcctaagaaaatacactgtgggaggggaaccagggttaaggcgtgtttggaagtgctacttcccctgggtcctggctgctgctgttttgctttttgtcggtgctggttctatctgca

SEQ ID NO: 7747 - DNA, 827 bp, Zea mays
tgcagaactcttcttttgtgatgcctctttttgaagtgtggatcaggacactacaaaaccagcgaatagacatctgaaatctcagttccatttccataacatcaggaaataacaaagtgctgatcagattaattatcactgagccaacagatataactaaggaactgatgtagcacccagctacactcaccagtattgaaacaagtgacaagggaccagggtatgacgatatgattttctcaaaagacactgttgcatttgcaaacataaaatagctgttgaaagagaataatttcaagtgatgatacattactgcactgataagaaagagcaagtgccaaattcggatgccaggcaacctacacgttcataagctccaattcattcacccagaactgtgcccgctccaccaactacagaaacaaaacaagtagaacgtcaccaaactacaaatttaacaatgcataagtaccggatgcagttcaaaggctcctacttgggtacaattgtacaaatcaaacctaatttggcagacccacatggaaaacagatgcacatttaaatggtttgcttggacacttacacaagacgaaattccgcagcagacaacttggatttaaggggttgtccacatcaagataattgcattatgcgcaatggaccgtgtgagactggcatacgcttatatcttttatgccaaaatatttcaacagcctggcaatctatgtaatgtggaacctcaggaaagaacgaaactgaatcatcttcgagaattgttccaaacagcaaagcaaatgtctttgaaagcaaaatgatggcatgcgatt

SEQ ID NO: 7748 - DNA, 839 bp, Zea mays
tggatggatgctgtctgtcgagtttattctagggtccccttaatcccctctaatacccatggagaatgattgatccaaaagagccattgaagtttttgtcgatgggacaagattcaagatgtgaagaccggttgagatttgtgtttgcagataagcaacagtcttacacttagagcatgtagaatatgtttgcagcacaataatatacagttgagacaacttaaattagttctttttaaacaactcaaactagttctttcgaagcatacccactgattttaatattactaaggcacacttatgatttgcaaaaggtagctgtctccctactagctaataagagaaaacatatcttaagcaaatagaaaatacctgacttcttgttaacccagtttgtctcgataacattagcttttcagagtcttttggatacctaaaagtgtcagtgtgtcatgagaacaaatgaaaaaaggggggtgagcgaacatatctctaagttaaacagaaaaaacttacgggtgaaggaagtgttcaaaaagccaagcccggagaatcgagactgaattttcaggtagccccctctgtggcctccaagcattttgctgtagcataccatactgttggaaagctcgctgttgccttatttgctgatcgatataacgaaggcgaattagtttgccctctttgccagatgcatcgtcatcctctccaagtttcttcctgataacactaatttgatcattgatagcatcctttagacatcggaaatgccgtgagattgtctggagggcaactgcaggtcgaaactagagaaatcggcgggtggcccatagaatagt

SEQ ID NO: 7749 - DNA, 794 bp, Zea mays
agaatggacctgcgtttcaggtatgcgttttgatttatcctgagattctgaggtttgttttccttgttttgatgacatgttttatctccatgtctgttcaatctagtaagctgatctatgtagtttgtaacttctacaatatcctttaggtttaactaacttgtcattgaccaccttaatgctaaataaaggggaaattttgttggcggacactgttctttgatggaattgactgtttaacactgctatttcgttggtttgccaaataccattacaaaagccggtaagtttgctcatggacactgcacacattattttattatttttcttggacctgagggaagagaaggtggtaaaatgtcgcttttgccctcgttttcaacctcttgttcccttgcttctcaaccggatctcttcctcaatatcgagtgaccgacgccgatccccgtgctcgctgtggccggtcatcgtgcagctggcagctgccatcatgctgggcacccctggctgcacacttgcgtcgcttgaccgatccccgtgcagttgggtatcgctttcactgccgcgctggacaaccctcctacacgctcatgcagccggtccacgtgcaaccgagcattgccgctgccgtcatgcgatgggcaccctttttatgaggtcctccgttgtggcgaggccccgctcgagcaggacgatgtggtcgatgccatcggccgccctgtgcatcgcaccattaatgccactgatgcccacgggcaggcgcatgaccagcgaacacatgtggaggggctgca

SEQ ID NO: 7750 - DNA, 822 bp, Zea mays
tggaatttttttgtatcaatcaagtgtaaaacattgtggtcatttttttacatacctgacgttgctgtataactcaatagattcccttttcccctagtcccctaccactatgattcttaaaaatatgtcccttcgatgcagcttatcgatgctttagagttgagtaaagagaccatgaagacggtgaagcaaaatctttggtgggctttcctatataacattgtatggttctatcttttctctttggcatggtttcttttttaatccaacagattatattttaaatggtaatttgttgtacttgctgagcaaagcattttggaggtattattgtactccctccattccataaaaagtttgactgggtttgtaaaagatattaccgatatttgtatctccaaataagtttattataaaaatatatttaacgatctatctaatggtactaattatgtgtcataaatattaaaattttcttatatatgtatggttgaagttaaacatgtcttgagttcacgggaagcgagaatggtagtgttttatgggatagatggagtaaatattatgaagcgtcctaaaaaagagagccgatggattatgtaaaaattgtgcaatgtttgctgtatattgattgtggacttgtggtataggctgttaaccatgtcatcagttcatgaccaaaatgctcttagatttgaatttcatgtttattctgacatgtacatgtacttcttatttatcaacttaggtttagaagtatatactgcctgctctgacctccgccctgcacgttctcatatacttaagttactctggaggtcg

SEQ ID NO: 7751 - DNA, 877 bp, Zea mays
aggcttccatggacaataagaccataatattgacgaccctcaacgctgcatgggcttcaccgggctcagtgatagatcttttcattgatagttttcggcgtggtgttggtactagttcactcttgaggcatcttgtgatagtagcatttgattttaaggcatatgaacactgtgtcaagatccatccctactgttatgctcttccaaccaaggatgttgatttttctgaagagaagaggtttcagacaactgggtatctggaaatgatgtggaaaaggcttgatttcttgcggctagtgcttgaaaaaggttacagctttgttttctcggtaaatttataccttgatgtccctcctgttcgaatgcattaaaatacagcttatgaactattcagtatgagtttcttatttgtagttttatctgatataaactactgcttcccctctgtatttcaggatgctgatatcgtgtggttccgcaatccatttccccacttctatactgatggagtttttcagattgcatgtgatcactacgtagggaatgcaactgacttgaggaacatagccaatggagggttcaactatgtgaagtcaaacgaccaaagcatagagttctacaagttttggtattcttcccgatttagatatcctgggtaccatgatcaggatgtatttaattttataaagcatgatcgttacactacggacattggtctgacaattaagttcttaagtactacctacttcggcggcatatgtgagccaagcagagatttaaacaaagtttgcaccatgcatgcaaactgttgtattggactgcaggtagactctaaagggtcccgggcactggcagtgcaagtccaagggggcggggg

SEQ ID NO: 7752 - DNA, 838 bp, Zea mays
ttggatgcaccgacatcagctcgaacctgctgctactgcactgctcctctattttccttcccggtccataaatccaagcatccagcttctccttcaattgacaaccactagcagcagcagctgccgccgccatcaaactagcactcaccttcctttctctctgctccaatccttccaacatgatgtagaggtgtattttctgaggtcaaaaacaaaagagaaagcttacatgtagagatgtattttctgaggtcaagccatcacacttctcctgaagttgtttcaattcttctttaagtgaactattttcctgctttagcaaatctgcacgattggctacttcctcccattcagcctgtagtatgccataaaaaacatagaatacatcaaggcttgcatgaagcaaagaacaccaaattatatgaacagacgtggcagcatctacccttttaaggtgtcacagcgaggaaataaataaaatctgtgggtcctgctatcagctatatgcatgagcttggagacaaatatgcagctgttttcacaatgttcctcaattattttctttagccttaaggaaaactcatgatatattattccttggatgctatctgctttctatgatcctggttcaatcatcatcttccaaggaaaaaatgcagatatattagtcctcaactaggtgtattgttctggtgaaatgttggttgtcatccatgaacactaactaaccactacactactacagtagcacatcttcgttctttattctaggaacatgtgcaggaacacatgcatggtccacatggttatgcatatttagcgattattctcatcatct

SEQ ID NO: 7753 - DNA, 802 bp, Zea mays
cccggcgattctctagtgtcgacctgcagtttcaacaaaaagccttccttcacgcttgaaaaaccagtacctattgtactgcctgtctttaccaagtgggctggatcggatggataatttctcaatctccgtctcaaggtgctgtaccttcaaaacattcaaaatccaatcaaaactgtaaggctcaatacccaacattgccacatacaaccgaacatgactagaatacatatattgatgcatctgcaaatgcaaatgcaaatacaagagtcaggtgctcaccaagtgtcgtttcccttctgttctactccgagaaatattgctcttgtcattttcttcttttctcctaaccagctcatctacacccccatgaccaacttgcacatcatctgtctgattctcctgacttttcatggcaatttcagtgttaagatttttctcttgtttgtcctttctggtgttctctctttttgttgcattgaggacttgtttctggtccacacggtcacttagtatctcctttatggcagaggtttgaatagcttcttccactagttcccggaggatcttaagctttatatcagtgtcaaaaagaccataataaccccttattactgttgcaatgtttgtggaacgttcttcattttttgtcatttccaagaaatcacatagatactcagcccatgttactgaacttacctgcaatggatgcacagaaaaaaggatgaaacgtacactcgataaaggagggtggtcgaacttaatagtactaagtgagaacctttaacttccgtttcttgtt

SEQ ID NO: 7754 - DNA, 855 bp, Zea mays
atcaagttcaagagatccttctggaatgccttctttttcagttccgctcatcaaataatgcgggacacaatgagaaaatcttagtgtgtcaccctgaggtatcacatatggagctgcctctccagactgcacaaataagctaacatagccttttaacttcacaagtggcatgacaataatgctagtgctcgtggtgagatcagaaagaacttgaacaacttcataacgatggttcatttttttgtgattgccagcatctgagctccaaccaatatcccatcccttaaaaagggcccaaacctcacctttccttggatatatttcatagaagttgtttgtcttgcttctctctaatgatataatctgggagaacataccaatttcactcgttgtctctgactgtccatgcgtaaagtgtccacatgcaacaggcagacccctgtaagaccatgcctcctccgctttatttgcaggattgaactccagccacataaagtttagcataaactttggaaccatttttacctttgtgattcgagcataaaatctaggcatacaaccttgatcatcatagacagcccagacctggttggctctaaattgacttgcatctcgaagtttgtcaaaatcaaaaaattcaggatctgggaaagtgaatttgttatcatctgaagcatcatcatcgtttagaccaagaccattgttcctgacagaatgaaatagctcttctttgccatcactattttctccaacatgcattggttctctcttcatctgctcaacacaattggaagttttctcttcacatggcaaaccaccattctttttaccttttatgttactgcaggcatgcaa

SEQ ID NO: 7755 - DNA, 881 bp, Zea mays
ttaccaacttgaagaccgccaacgttcattgacagcgactccaacgcgtgaactgataaaaaaaaaatcttggattcattgcactcaaacacccgccctgctacggaggttatcatccgaacatacgtttaaaagacgaaaacgaaacgaagccaagtctgcgttcccggccggtcaatacgcttgcgcgtgcactcgtcccctcggccctcctgtgcagtgcagctgtgcagggccgcctccattttccatcccaaccgttccaactctctccacccaaaaagcccacgaactttcgacggttccttcctccctccctcccgctccaaccaaggcctacatatacgcccgcccaccacgcccccgaaaccatcaacccaacacggcgtccccgtcccgagtcaccatcgaccctagcaaaaccgcacgcaccctgccagcggccccccaactcccaacccaacccctactccagctagctcgcggcggcggccagcggccatggcgttccggctgagcaacaacctgatcggggtcctcaacttcgtcaccttcctgctctccgtcccgatcctgggcgcgggcatctggctgggccaccgcgccgacggcaccgagtgcgagcgctacctctcggcgcccgtcatcgcgctgggggccttcctcctcgccgtctccctggcgggcctcgtcggcgcctgctgccgcgtcacctggctgctctgggcctacctcctcgccatgttcgtcctcatcctcgtcctcttctgcttcaccgtcttcgccttcgtcgtcaccaacaggggcgccggcgaggccgtctccggccgcggatacaaggagtaccgcctcggggactactccaactggctgcaggcagc

SEQ ID NO: 7756 - DNA, 869 bp, Zea mays
agattgctcagcccatctccatggaggttgccatggtcgtcagcgcaagagccagcctgctgatcctcgtcatctccctctgctctccgtacaaattcatacagagccccatggacctgggccccctgaacctgctccccaccaccagcaccgcggccgcgtccagcgacttcggcaggatactcttccgcgccccggccgcggtgctgaggccccagtcgccgagggacatctccatgctgctcagcttcctctccggctcgccctcgctgagcagggtcacggtggcggccaggggggcaggccactccatccacgggcaggcgcaggccccggacggcattgtggtggagacgcgctccttgcccggcgagatggagttccaccacgtccgcgggggaggcgaagggcgtgcctcctacgccgacgtgggcggcggggttctgtggatcgagctcctggagcggagcctgaagcttgggctggctcccaggtcctggaccgactacctctacctcactgtcggcgggacgctgtccaatgccggcatcagcgggcagacgttcaagcacgggccacagatcagcaacgtcctccagctggaggtagtcacaggtgagacacacgcacgcatgcatgcgtgcatgcatggtacatagatgaaacacaaagatcagatttttttttctgcctctctttcttgaccaacaaacaacctctctctctctctctctctctctctctctctctctataacaaacaggacgaggggagattgtggaatgctcacccagcaaggaggccgacctgttcaatgccgtcctgggaggcctaggccagttcggcatcataaccagggccaggatcct

SEQ ID NO: 7757 - DNA, 832 bp, Zea mays
tgctctgggtggaaattctaacacagctatcatctgcaatataacacttgcacaggtattctatatttctttatctgctgtgtttggactattggataatggaagtagaatggtacctcttgtcccatttctttatcatatatttgtaatatgttttgcttatccatgatgcttattgtggaaactaagttgaaaggtgccacttcttttcttttgttccattttcatgtcaaggtaacagctcaaagtagtattttgaatttctgtctttcgaatcagttgcttcattgcttataaagtcatgtgccatagagaagcaaacaattagttagtcaacaactcaacatgccattgagaaacacaaagagcaaacatatagtcttagaactaacaatttgtgtcttggtaaactatttattttttatattttgtagatccacactgatgagacaaaaagcagtttgcaatttgcgagtagagcattacgtgtaacaaactgtgcatgcgttaatgaggtattaacatgtttctgttgcccactagattattgtttctattcattttgatataattgcataaatccttatacattatatatgtttgcagattttgacagatgctgcattattaaaacgccaaaggaaagaaatagaagagcttcgagcaaaacttagagtaagtattaaaaaatgtttcttaagaaataaatctattatccatacttctttaaaattgaaacttacattcttctgcctttagaaatctgaaagtgatcattgggaggaagaaattctgaatctgcgaaacacactactgcaggcatgcaagactg

SEQ ID NO: 7758 - DNA, 837 bp, Zea mays
cgcgatcctctatatcgatctgcagttttgaatataaaataaattaaggtttaatccataaacccatccgaaatttcacacaggtcgcaaaattgatcgatatgaactgagtttgataagcaacaataaactttgcgaacaggggcacatgcgcatagcacaccgtaacttattttgtcaccatatttcatataataagcagacacactaccaaggtaaataattatatgaatctcagatgaatgagatagtacaatgcataggtcatggcttagtggcagactactttttttgctcatagagtcaggctcaaggatgctggcagacaataatattaggtgtcactaatgtcaaggtaaatatcttctaagtaaagtagatatgtaaatgctatggcatcaatctgccgctttaaataaaataacaataattcaagaatgccttggtacacatcaatttttatgtcctacctggtttgaagaacacggatagaccaaaatcgattgcttctattgacaaatcatcttctttatccaagtggaggaagttttctggtttcagatcacggtgcataaccccaagtgaatggcacatagccacaagactaataataattcttatgagctatgtagccctctcttcgctagaatgccctttctcctgaaatattttcaaacaaagtgttcagcaattgccagaataaccaggttccaaatgcctgttcgagtccatgaaatcgtttggcaagtggaactgcactcagacatgctgagtttttttcacaggcgtcggaagcaaagcaagttgtgcattcacatgacaccctacatgatagtt

SEQ ID NO: 7759 - DNA, 590 bp, Zea mays
tgctcgtcccgcaggtactcgtccacaatacttgttcatcaacgtcctccgatgcttctccgccagccacctgcctggtgcatcgaggtgtttcatgagtagcctctctgccattactagatcctggccacaaagaagttcagaccttcagcattgctcttggcaaactggcaagacactagaaactactccctccatcagggaaagaatgcaatgacaacattatattgagtcaatccattttgagtttgacgaagtttgtacaaaagaagtatcaatatttatgattaccaaaaactgtcataagatccgtttgggctgaaaacagtcggtaacaatctctctatatatgggaatgattcccagtcagtcagaaaacacatcatattttcaatttaactattcagagacaacatcaatacagtactaacagaagttagaaaaatcaacattttaaatatggtaccggtagaaaacgggcatagaagatatcaccttttcgaaaacgattctcagtaaacaggatctttcatttccatttttcagccctaagattcgtcatgaaatatatttttatgctatacagattt

SEQ ID NO: 7760 - DNA, 812 bp, Zea mays
tgtgttttttgcacccatcaaaacataagtttgagcatccaagattttgttatgagcggcttgaatacgtcggccagaaaattcaggtatgttgtgccttcttatgtacatgtactacctccgtccagaaaggatgaaattctagctctattcttagtcaatctttctaaattttgactaagatttacagaagaagtatcaatatttagttatttacaacacaaaatctgtatagcataaaaatatatttcatgacgaatcttagggctgaaaaatggaaatgaaagatcctgtttactgagaatcgttttcgaaaaggtgatatcttctatgcccgttttctaccggtaccatatttaaaatgttgatttttctaacttctgttagtactgtattgatgttgtctctgaatagttaaattgaaaatatgatgtgttttctgactgactgggaatcattcccatatatagagagattgttaccgactgttttcagcccaaacggatcttatgacagtttttggtaatcataaatattgatacttcttttgtacaaacttcgtcaaactcaaaatggattgactcaatataatgctgtcattgcattctttccctgatggagggagtagtttccagtgtcttgccagtttgccaagagcaatgctgaaggtctgaacttctttgtggccaggatctagtaatggcagagaggctactcatgaaacacctcgatgcaccaggcaggtggctggcggagaagcatcggaggacgttgatgaacaagtattgtggacggtacctgcgggacaagca

SEQ ID NO: 7761 - DNA, 831 bp, Zea mays
gcagaagccacataatgagttcctctgagtattatctctcgtgttgactttcaaaacattgatagtgatatggctttgcattagcatatctacactttctgaaagttcacactccaggttctctcagtaggttttaacttctgagaggtttaatcattttggagctcagacatgtgtttcctgatcgatcccatacttaagcacgcccattgtttttagtaaaactaatgcaaacagttttgactgatcattcttttttttttctaaaacgcgcaggagaactgcgcattagatatattaagatagaagaaataccaatggtctaaagaagaccagagtacagaaaaacaacaaaaaagtaaaaaaataaaataaaataaaataaaaataaaaataaacatccatctagaagacagccaaagctgcccctaaactaaggccagatggtgcccagatcattggcacccgcgagacaccacctctgagcgtcgtctttgatattctaaataatctggttgccactaggagcatccccctcaaacacacatttattccgctgcttccaaagccaccatgccaccaacatcacaagggagttaatccctttgcgcagcgcataagggaccttggcctccaaattagcccaccaatcttggaaaaccaaatcatcccttgcgggggagaactgccgcagattaaccagggagaaaatcctaaaccacacttccctagagaagacacaagaaattaaaagatgatgcaccgtttcatcctcttgatcacaaagggggcattgaacaggatggtccaaacccctcttcgccaagcgat

SEQ ID NO: 7762 - DNA, 829 bp, Zea mays
tttacctgcagccaatccaggaagacttaagaagcttgcaacaacaactgtaagggcctgtttggcaacaatgtttctcaaaaccatggttttacaatactatacaattgccatgacaataccatagttttggccagctccaacgatagtacctattgtttggatacaatattgtaaactatggtatttaggcaaaagttaatcatgcaatgaaaactttgggttgaagtggggtttccaatactcaaaaaaataccatgttatctagaataccatggttttgaaaacatagttcttaagaaaatgcaaccaaacaccttatggcataaaatactttggtattcctataaaccatggtattgcctagaaactataaaaatattttacttccaaacatgccgtaaatatggtaacaaaacctgtgaaaatagacaatacctataccacaaagtgatcacacggttagtaaggttgccattgtgatcactcgagaatgatcttgcaaggccaaaatcagcaagcttcaagttaccctcattgtctatcaaaaggttagatcctacaaacaaagtaccaaatacagtatgttagctcaacaaaacataaaaaccgaataaggaagacaagaaaaactcagcagagatgtttgcagctaagacctttgatatctcgatgcagaacttggttgacatgacaatagtgcaggcctgtaagcagctgcctcatgtaacactagaacaagaccacgcatcacaagatcatttcatcagggataaaaccatgacacatcctaagcagagctctgcaggtcgaaactagaggatggccg

SEQ ID NO: 7763 - DNA, 816 bp, Zea mays
actctctacagtcattgcttcaaaaaaaaaaaaagtgatcgactgcacgcaaggcactccatccaaactcatagcaaggtggttgattaattcccgaaccaatcgacgccaaagcagcaacccaaccgactttagattgcaaagccaatggttgcaggcagatatatatatctgcaaggccggcctattgcaagaacatcacatatagcatcgcacggcacccatgtagcgtaggcatgcatgcatggcaggcacaccaggcagtccacaacagaacggtggtctacgtctacggtctacctgctggccatgcacgccaggcccatgagctgctcgaagcggcgggcgtcgcaggggatccgcagcacgccgggctgcccgtacccgtactgccgctcggccatctccagcagccccaccatgcgaggctcgttgagcagcgccaccggcacaaggacagtctcgtcctcgtcgccgccgtcgccgtcatcgccaccgacgagccgcatgggcacataccctctcggcttcgcgccgccgcggaccggcgaggatcccgcctgcttgctcgctgccgccgccgccgccgtcgccgccgcctgctttctccacagcaccttcgccatatatacggtgcgcgcgcgcctcgtcctgcggttgaagtcaccgtgcagttacgacgtcgtcgtacgtaccagcaatggcactggcgcgcggcggcaaccgtgcagctggctagttgggtggtgggcacgccacaccgtttatatagagagacagaggggaaggaaaggtgacgggattgtcaagggtgat

SEQ ID NO: 7764 - DNA, 611 bp, Zea mays
cttgcatgcctgcagtttggctcgaagtcggtcctgagcatgtcaaggctgaagtgtgccctgcggggatttgatctgagggttctcttgatcctactgattggtgtgccaattttgatctttgccatatatgtgcatggccagaaggtgacttacttcctccggccaatctgggagaagcccccaaagcccttcacaatactccctcactattaccatgaaaatgtctcgatgggtaacctatgcaagttgcatggatggaaagtcagggagactccacgccgtgtctttgatgccgtgctcttcagcaatgagcttgacatccttgatatccgctggcacgagcttagcccgtatgtgtcagaatttgtgctgcttgagtccaattcaacttttaccggcataaagaaggaccttcacttcaaggaaaaccgccaacggtttggctttgcagagtcacggttgacctatggcatgataggtggaaggtttgtgaagggagagaacccatttgtcgaggagtcgtatcaaagggttgctctcgaccagctcattaagattgcgggcatcacggatgacgacctgctgatcatgtctgatgttgatgagat

SEQ ID NO: 7765 - DNA, 800 bp, Zea mays
gccaccctgaatcagctaggaggtcgtccgtctgccggaaatgtgcatacctcgtcttcccagctctgtatctgtgcactgaagccctccagctcttgtcgtcgagtaggaactggaacgagtagaggtagttcctgagctggagatggagtatctccggaacgtcatcgcaccatctcaagaggtcgatggtgtgtccacttgggatctcatcaacatcagacatgatcagcaggtcgtcatccgtgatgcccgcaatcttaatgagctggtcgagagcaaccctttgatacgactcctcgacaaatgggttctctcccttcacaaaccttccacctatcatgccataggtcaaccgtgactctgcaaagccaaaccgttggcggttttccttgaagtgaaggtccttctttatgccggtaaaagttgaattggactcaagcagcacaaattctgacacatacgggctaagctcgtgccagcggatatcaaggatgtcaagctcattgctgaagagcacggcatcaaagacacggcgtggagtctccctgactttccatccatgcaacttgcataggttacccatcgagacattttcatggtaatagtgagggagtattgtgaagggctttgggggcttctcccagattggccggaggaagtaagtcaccttctggccatgcacatatatggcaaagatcaaaattggcacaccaatcagtaggatcaagagaaccctcagatcaaatccccgcagggcacacttcagccttgacatgctcaggaccgacttcgagcca

SEQ ID NO: 7766 - DNA, 752 bp, Zea mays
accttcccagccacttcaaaacaaccgcagcgttcctatgcaattttttggcttcaattcgctcttccagtccctgtatactcgtaatgttatgataacttcaggagataattgtcgtcaaccagaaagcaactgtgctggacatgtgttcaatagactgaccctggaattaaatgatagcaattctatgttgaacaaagaaattggcatgggtagagaaactcttgatctggctactcagacttcagctgctgaaggatttcagatgatttctggtggctgtagaggaaatgttcagagtcaaattgatattttccaaatgagaccagaaagaaatatgaaactgcccagttccagtaagtttagctctagatctctagaagaaaaacaaaatcagtgcacagctgcctgctcaaatgatgcaacacaaaataaaggtggtttgagggaaagcttgtgggtaactcggcttttgccaaaagcatcagtagaattgatggaggcaacaccatgcaatgtagagaatgctgttagtccacaggctgtgggtgacaagttgtgttgtccacctcttcagaattttaatttggagaaggaactaaataatatacaatacttcactggaagaggaagcagcgatggtgtaacaagtagtaaatgtccagcaacgcctccagaggaacctaagcaatctgaaacaatggcttctgtttttgcaaagagattggatgcacttagacatgcaaacacct

SEQ ID NO: 7767 - DNA, 813 bp, Zea mays
aatataaaaaaggaggtaagttgaatttgattgcttctaagtgcaaaggaaaatgcttccatagaaaaactaaacagcacactaaaaatagtttgtaagatatcttgaagacttgaactaaccattgttgttaggtacccgttggagagcttcatcaaccatctgctgaacagattttccttctggatcatggaagttactgacatcagaggaagtttgataaattatggcatttgggtgtatactactgctactgctgctacaagtctacagcacaatttgattactaagtaattaagtacctttcaaaaatgtaggtacctagaaagagcatcaaccagttactgtaacaaaatgacctttgtgaactccatgacaataatatgataaaaaggatgaggtaacaaagtgttaaaactattaagactgactccttgaagagataaatttaaacagatacttttgtagaatagaaaagaaacagtaacaaagctgattatttgaagaatcgacactatttctgcatccaaaataactgttaaggtcaagcataaccctacagtttttttagcagattcaacattttcaatactaggagatcaagggtatatgccgcataatgatgatgattatgatctgatctgtgactggttatcaaattatatgcattcccaggacagaataaatactgtatgatccaaacaaaaaaatgcatatgcgttacaagaagcaacttacggagaaaatccctctggatcaaccacagaagtttggctggctcaaaagcaacatgcttgcccctgcaggcatgca

SEQ ID NO: 7768 - DNA, 895 bp, Zea mays
gcggcgccggcatctctggcgcgtggcctgatcatcctcttcctccgccaccgcagctgcaacagcaggaaccccgggggggttatggccggaggcggtacaaagatgaatacaacaataatcctaggcgagccaatgacactagtagtagcaccagtagcagagatgattgcagccgtggcagctgcaatggaagagggaagatgaagtatgggaaatacaggagggggtatttggattcagggagggacagggagaaggagaggagaaggccatttccaaatggccggcgctacgaggaggataaggatgaagatggggcacctgggtttcggagggagcgagagcgacacggcaatcgggggagtgatgaggtgaggcctcatgatacagaggcactgagggaagggacaccattgacagcgaaggctgtagaagggttctgcatggaggatgcaacgtcaaagattatgagctctttcaaagatactagtaaggattctaatgatgcgccaaaggtgccggaggagactgaggaaggcgaggtggaggatgacagggagacgcagaattcagaaactgaggtagtgaagcaagggatagataccgatgtaaatcatgcttcttgttatgttattacagagtcaaatcccaaccagttatcagatggtaagattcaagatgagattcctgacgaggaagctgaagatgacaaaaaagttatggatgaggctacttttgatcacaacacttgtgatggtgaggtgacaaatatggaagttgagatgcacgttggtaaggagagtttgattgactattgtaacttcacgagaaccccaacaaggcctaggtcagcacgtgcacacagaaatgcagcatctatcccaggagaagg

SEQ ID NO: 7769 - DNA, 920 bp, Zea mays
agacaacagatcgatcgtcccatggcgatcggcgggtcggaggccggcgggggaggcgcggggagcatgaggagcgtgctggtgacgggcggcgcggggttcatcggcacgcacacggtgctgcgcctgctggagcagggctacatcgtcaccgtcgtcgacaacttccacaactccgtccccgaggcgctcgaccgcgtccgcctcatcgccggccccgcgctctccgcccgcctcgacttcatccgcgtacgtaccgaagccgcgctgccggtccattcagcatgagcccttgtttgcctttgccccgcgccacgctgattgaattgctctctcgatcgcgctgtgctgcatgcccgtcgcgtggggtttttcagggggacctgaggagcaccgatgacttggagaaggtgttcgctgccaggaggtacggtgctagatcgatccatccatgaagctgcacgcgctttcaaaatcgacctctctcctctgaagccctttcagtgcttcaatttctgtctcccttcaaatgacgtgagtctcactctcacgccacacatgcgctgctgtcctccatttccaggtacgacgccgtcatccacttcgccgggctgaaggccgtgggggagagcgtcgcgcacccggagatgtactacgagaacaacctcatcggcaccatcaacctctacaagagcatgaaggagcacggctgcaagaaggtactattaatgctggatcgcctccgataatcctgcctgcgcgcgagcgttgcatcgccacggcgcgcggtggccgccatgatctgactgacactgacgccgcgagcgcgcgtgtgcagctggttttctcgtcatccgccaccgtgtacggctggccggaggtgatcccatgcgtcgaggactccaagctgcaggcatgca

SEQ ID NO: 7770 - DNA, 872 bp, Zea mays
gaatccagagccttcgactcttcttttacaatcttgaagaacaactgaaaaattgcctaataaggagatagtaatttctcctcaagttcacggaaaccacggtagacattctctgtttggttctgtggaaggtttaatcgcctcacctcagtcatgtacctaaagttgcaatgcaatgtaagagaatatcctagcagacgtgtgaagtggtagcattgttcaaataacaaaataaaagtaagtcaagtagtagaataatgtaacgaactttttaaggatttcacagcattttcaaacaattggtaaaagcacatttgtatgaaacaatagtccagttgaaagagaatcataaatgaatgtaacatacagatttacctgttagccaaactaattattttatctcgagcaccttgattcgcagtccctgtttggttcagtgaaaatgttccatcaagaaagattgaagccccagtacttgtggtgccaagcctatgtgcaatgacagatatcccccactcacggaggatcgcaagaactgatcgcagcaagcgcaacttcagatttagtgagggtattattgcaccgttcaataacagttgatcatacacagcaagtacaggttcaggaagacctttacatgcaccaagaagagctcttgcaacatcatcatcaccgactaattcttctcctgaacttaatctatcctgtagatgagagcaggataatattgagtaccaagtggaatactctcacagttagtctcaagtatgcatgtacgaaaactacagaatacacattaccaatgcagccttctcaagatgaaggcatattatatctaaaggtaaacaagctccatctgcagaacaggcaag

SEQ ID NO: 7771 - DNA, 749 bp, Zea mays
cttgcatgcctgcagatactgacctgttttcccaaaatggcattccacctttatgatacaagtaagataagagtgaatcctgatcaacctctcctagtgcgcatgagatcttctccagtaggggaattgcatacaagaagataatcgaaggtatacccagctgcttgtgcttatcattagaaaaaggtgctgaaatagacactattaacaatgctttgacccttggtttgtccaagataagctctccgtcagatgccatagtaatctatgatatgcagataaaataacattagaatacattcctcagaaaataatgcaaaagatacaatggaggaaattgtagaaataccaaacccagatattggtgcatctaactagacagttgttactgattgacatagcaaattcaagtatagagaaaggcgtacaactagcaacattattctcagatggcacacatgtaaatacagctggaagttagaaattgaatacctctttggccaaatgtttagctatgttagctgaaaagctcccatggttcttaccaatggaaaacataataccgtatatatcctcttcctgcatgaaaaaaataaatctagtttaatcatgaaagagtgaatatacaagatgctgagatgctgacatataacataaattgatctgaaaaactgtgatgattgtttttcagcaaaggtgtggcactaagatacctctggatacttctccaaacttgtaacaagaccatc

SEQ ID NO: 7772 - DNA, 942 bp, Zea mays
ttgcatgcctgcagacaaagcagttaagctcggctctgccgttcttttccgttgctcgatcagttctctcttcaggagccgttcttttccgctctgcttagtcctgttcaggaacggcactagcctctgtctctccctgagctctgttacagccacacgccactggactctagaggcatgctagctgttgttagtcaagtactggtgttgctgcgtaccgcgcagtgccacttgccacataaattctgcattcgtcaaacattttttccatgcatatgggcgcacttgggcacccggccggctcagattttagtttccacaacgctagctggtcctgcacttgagcagcaaggtcagggcagggatcgagctgggcgaccgtacaggaaccctaatagtgtcgtcattatacgtcgtcaaaggaccgaacaggactgcaaacgtcgggacacgccactaacgatcgacattcgcacatacacttatgtgtatacaattgcaagagctagctaattgtgtttaccatcgggccatcgaaatatatgtttataactatatatatatatgcatatagttattatatatataggataaaagggtcttcatataagtttccgcacagggcccatgaaagctccctgagttttggttagtatgtgttgtttgttgatcagtgcgcgaccatgtcgacgcaggtggcacatcgagacgccgagcatcatcgagggctccgtgctcgtcatgtccaagacaggcgttggcctctccatgtttagcatgggtacgtacggaactagcagcgaccgcgtcctatataagaaagaacagtacagccaacaacactgactctatatctacatctactatattgcgttgattgatggtgctgtggcggcagggctgttcatggcgctgcaggtcgactttagaggtatcggcggg

SEQ ID NO: 7773 - DNA, 848 bp, Zea mays
cttgccccccgtcaccatgtacaccatgtcgcagccgagctgcacgatgagctgctgcggcaccaccacccagggccccaggcgcgggcccagcgcgtgcgcgccgaggtcgcggagccggtcgaaccgcacgccgggcacgcactcgtgcagctcgatcagcagacgcagcgtgtacagcgtgatcccccacgacgccagcagcgccaccatcccggggcccctgcatgatgatgacgatgaaaccaagcaacaagaaagaaacactgctcgagtcagcgagccattgcatgccgtcaaagtggagggtcagtcaatccagtcggttaccataccatcccaggtgagccatggcgtacggcaggctgagcacgccggcgccgaccatcgcggtgacgttgtggaacgtcacgtaccaccacttggcgcggcgaggggtggcctcatcggcgacctggaccacaagaaaaacagcgcctggtggtgaatgactactgccgtctcaatcgaaagcaatatcccgatgggatgggaacgctagcccgtgaagaatcaacaggcccatgcaatgcatggagtgcaagccagccgtgtccaagaaccttggggagagctgacgaaggggagaccatggccggtcagatcgctgcgtgctaggctagctccacacacggacacactagcgctgacacagggaggcgatcgcactgtggcatatataacgctatcgcagagctggtatttatagcggctcgtcagcaagcaatggccaataatgggcatcatgtgacttgctcttttttttctttctcccgctccgaattgaaaggagtccgggaatttaggta

SEQ ID NO: 7774 - DNA, 864 bp, Zea mays
tgggtgcggtgggggtggccgggtggggtgaagtggagagagaaaagaggaggaggtcgtctactcgtctggccctttccccttctttgcccttggcccttggcctcctttcgtcgagagagagagagagagagctgtgctggctgctgctgccccgggtccgtcgggacgggtagatgaggaggaagagaacagctcgtgactgactgactccctccctcagcgtgagtgggttgcggacgaccacatccatccgttcccaccattcccttctcccacctcgcctcctccccttgcccttgcccttccacagccggaatcagggggtaatgggccagatgggaggacccgacggcgacggcgacggcggcgcgggcccgcaccaccagtaccactaccaggcgcttctcgccgccgtgcagaaccccagccagggcctgcacccctttcccctccccttccacgtgcctctgcacgcaggagcgggagcacccgccgccggtcagtcactctctctttccctctctccgcattctcttccccttcccttccttccttccttcctcaccggatggtcgggtgtttggatggattagggagggagggcaccacctggagtaagtagactaaattaccattcaattttgcaatcccggccgcaccctacgctggtgcttaattttgcacggcacaatttctattcctccaccactgtccactgctgctgatctataatttcttacagtacacgagagtactatcagaatctaaacctaatcttacttctatcagttaatactctctctctttttttctttttgcatacaaatgtttccaattcttgttgttcaccccaaaccctat

SEQ ID NO: 7775 - DNA, 886 bp, Zea mays
agaaacaaagaccgagctaagctcgacgccggacgaaacactacgcagtacctggcacgacgttcagctgcgcaagcacaaggggcgcaatgcagcggccatgggagatgctgtggaggaactcggcaggaaaaaaataaaacagagcaggcgactggaggagcgccggctggggaagaagcagctccgctgctggggaccagaggcggccgagcgaggcatcagggcgagcgccagggagtgcggcaaacagtacgcagcgagttgggaccaagcaccggccatgggagcttggccaggcgcggcgtcagagagctccaaccaggagccgagcacagggagataggcgaactggattgaatccgagttggaggtacggctgggcgaggcaccagagagatgggacgcgcggagcgcagagaagcgcgcaggggcgagctctagggagtaggcgcgcgacgagcagaggggagctgacgcgcgtgtaggcgagccaggaagcgggtgcgccatggctggacgcgagcaagagcagggagaagacaagcagagagagatgagcgtcgtggggcttcacagcacgcggacgccagggaagaagacgcgaccggacgccatggctgggcatagggaagatgaacgagcagagggacggcgaccagggagttccggccggcagagaagcatggcgcgcgcacaaagcatagaagctgggcacggccatggactgggagataggctcggcaccagggagctccgagcagggacgccgcagttcgagcgccggacgccgggcggagcgcgcgacgcaggaggagctcgagcgcgcggggaaggggataagctccgtgaagaaaaatctagagattgggagagatgagctggg

SEQ ID NO: 7776 - DNA, 654 bp, Zea mays
atacagctccgtcctctgcatcttctccgccaaggtctccatccccatgtacaagagcaggagccatacgtaggacaggtactccccgcccgttcccaagcctttggcgtgcaggtagcctttgcacctgctggccgagaagcagagcatctccacccacacgccctggatcacggtccacatcttctcctcgctgcccctgtgcgaatccacgagtttctcggctacgcaccaagcccggcgaacgacgccgacgccgacgcccgctgagcccaggacgtcgtctccgtcgtccctcttgagcagctggacgaccttgtgtgcgaggtctctcttgccccgtgcccgcggcgcgtcagcacgatcctcctcgagcaggcccgcgagctcgcggcacgcgtccctgaacagcttgcgccgggcaccgggcatcagcatctccggcttgacgaagagaaggtaggccatgtagttggacatctcgatgcagcggcgggcggtggcgttggcggtggcgcgggacgggtctccctggacctgaagtaagtggaagcagaagtcggtggcgaggtgccagacgaggacgctctcgtcgaacggcctcgacacgctgctcatgagtaccaccatggatgatacgccgaccccgatctc

SEQ ID NO: 7777 - DNA, 783 bp, Zea mays
cagggcgggtagtggttcacgcggaacacctggtcgctcccggcgccgctcaccatggagctcagcgcgtccgcgtccgcaatgcccaggccctccgccatcgcctccagcacacgcgccgccaccttccgcacggccgcgacgtactcgttcagcgcgctcctgcatgcgggtggagagtagcggtcaattggctggcatggccatggcagaacggaacaaactcgcagtcgcatgtatgtataaatatatactcaccggaacgcggcgctggagggcacggggcaggcgtcggagagcgacgcggcgtcgacggcgaggaggaggtactcgagccaccccatgtcgccattgagcccgatccgcttgctgccgtacccgaacgggtacgccggccccgcgcggtccttgtccgcctgcgcctgcgcgaagaacctgacggcctcggactcggccctgtccatggtggccgcggccacgccgtggttgacgaccttgaagaacccgaagcgctcgcaggcgtcgacgatcgcccgcgccgcgccgtggctggacaggtcgacgaccggcactcccgagaagctgtccctggggcccggggaccgcaggagcgggatctggtcgacgacaggcggtttggcgagcaccaccatggctgtctggcctgtactgtacggcgggcacgcgagcgcggatgggcagaggtcgaaacagggcaagcacggtgagaacaggggaggtgggagtcgagtcgaggcggtgtgcgtgtgtactacggctgct

SEQ ID NO: 7778 - DNA, 860 bp, Zea mays
tgcatgcctgcagctttgtcctatggaatgaacaacaaggagggccttattgcagtgtttgacctgggtggtggcacatttgatgtgtcaatccttgagatatcaaatggggttttcgaggtaattttcttctcatatcttgcacagattctctatgcagatgttgaaattggtgtagtaattcttaattctgacaccttgttcaggtcaaggcaaccaatggtgatactttccttggtggtgaggattttgatggtgcactgcttgagtatctggttagtgagttcaagaagtcagacaacattgatctgagcaaggacaagttagcactgcaaaggctcagggaagctgctgagaaggccaaggttgagctttcgtccactatgcagactgaaatcaacctcccatttatcactgctgatgcatctggtgcaaagcacttcaacattaccttgaccagatctaagtttgagtctcttgtgagcaatctcattgagaggactcgcatcccttgtgtgaactgcctcaaggatgctggcatctctgctaaggagattgatgaggtcctactggttggtggtatgactagagtaccaaaggtccaggaggttgtttctcagatattcaataagccaccaagcaagggtgtcaatcctgatgaggctgttgccatgggagctgcaatccagggtggcattttgaggggtgatgtgaaggagctccttttgctggatgtcacacctctctcccttggtattgagacccttggtggcatcttcacaaggctaattaacaggaacaccacaattccaaccaagaagagccaggtcttctctaccgctgcaggtcgactatagagg

SEQ ID NO: 7779 - DNA, 761 bp, Zea mays
agtagtgatctaaaaacattggattcttttggatcccttctaaagccaattaattccccgctgccagcatatctgtctgtccatgctggcacccgttctgattcatccaaccatgatgcatccaggccggtttgtcttgtccactcctgccttggcacattcgtcagattccggtgaaacagtgttgtctacgtagagtatgtaccttacaggaccaaaaggagaaagaaatatatgacctcgtactgtacgtatgtaccctgtcaaaaatgcttctgcttgcagacacaaatctggccctgtcaatatttttctccatcaatcctgattgcgttgtaggcttgtagctcagctatagtgatccatggtgggtcggtggtctgggatttagttcttagctaagtataagaaacaattaagaaaatatatgatttaactcagagactctagaccataaatacagctaaaagacaatgtatatagagaatcgtgtagagacgagctgttcgtgaggaacatgtctcttgtacttttttcttcaattaatgctttagagacttcttaagagactttaaataaaatagggttgtacaattggacagttaactctgattggcatttactacagaccacgtctctctttttgaaggaaaaaaaagtgcggcattttcagtgcacatcatggaaccaaagccaggggccaattatacatcaggagaaataaattcgctgtcggtgtctagacggttcttgcaatctgg

SEQ ID NO: 7780 - DNA, 829 bp, Zea mays
tgtgctccgtacttaccatctcatcgccgatgccccctcgatcgatgtgctcgttggattcaacggctttgattctggcatcaaggtacactgcattgtttcatcggagattgcgagatgaacgttcatgtacgtccagttgacttgctggttgtgtcgtgggctatataggatcccgtgcagtgtccctgaatgagaaacagtatcgagcggcgcttgtccgttgtccctgaatccttgcgcgagtctggaaagggatcttgcatgcgtcgcagggactgtggggaggcatgattggggccgtgcaggggccaccctcctcatgtaaacacacttgctctgatctggatcacactcacaactgattggaacggtgtggtaagctaagctgtatgtatgcatgcacctttggtgggcatcataagcctcggtagccgcggcgcatcgtctcactgacagatgatcctcaaatctggctgctcacatgcccagccgcgtagtatcagttctgtgcggatgcgttattttagggcaattattccgccctacttgcatcgcatgtgtgtgtggtcattgtagcttttttttatgtcatcattttaattaggttcgttgattagcataaattaatctggatttcgctctagattatattattagtgggagccccttctcgcagaacaaggagtgatccatgatatcaggacaggagcggacgggccggagagtcagtagctagtatgctgctgcaagtgaagttgacccaattcgcattattgctattttcgtgtaaatatatagaccactcaaataaacaaaaatgcagcaa

SEQ ID NO: 7781 - DNA, 764 bp, Zea mays
tgcagggtcagagaaacacacttcaccccatcgtatgatgttgtagatgaagtagtcaaggccttccgctacactcctccaaagatcaaggaaatccttcgaattaagatatagcttcagcttagaggtcctgtctgtcagaacatctagactgtgaacaaaaccaggggatactcctgcactttcttcgtccaggatctcatcacctatgacaggtctgtccactccaggatccaatgttctggacatattccttcgaactcaagcagaacccaagacagtatctgttccaggtaattggtccctaaaacttaactaaaaagctgatttcatctgtaaacagggatccttgaggacccatatccaagaaggtagcatcttcaccccattcccggagcacattctcgcagtaacgagcggcattgactgcacgcgaagtttttgacaaagactgatcttctaatgccgtatccgatgattgcaatgcttcgcagcgcccgtcgtggcaggaggcttcaaaatggaaagagttttgtccactctagaatcaacagccatgacaaggttggtccactgcggcctagtggtgctgatccatactaattctcgctcgatgtctcactcacagcatcaacagcgtggagcagtttcccttgcttccattatgttacctacatttgacaagagaacaacgatgtcctccttatttttgcaaaaataacggctgagccacatataacagcatggcatttcatcagtttctt

SEQ ID NO: 7782 - DNA, 852 bp, Zea mays
ataaagaatgtctctgttaagaaccctctctgctataaaatctagacaaaagtgcaacttgtatggaattcttcctaagactatctgcgattagaatatattattttgtgaagaacaaacaaaaaagaaagaaaagagactgcattttttgttgagcctagtagtaacttattgtcagcaaatatcaattagcattaatcctttgtgaacaaattcctcttgttagattgttttcatttttactagcctggcaagcaatgtaacctgaaaatttggaatcatgatcaaggaacaggaacacactaaataatatgatgcggctgtacctcaactccagaacatacataagcaactgatagcaagtaaaatgtaaaaattcagtacatgggcaacttacttagagcttgggttgccctgcgcccatccgcagtgaaaaactttgttggcctgccaacaatagcacgcccacatgtgtacccagggcctggagtcttaagagtgaagttccttggcaccttaacagttttattggtagttccagcaagaccaacactgatctggaaggaggaagcagcatttgctgggtcctggttaaaggtatttacaactcctgccttgcagcaattggcaatttgcatgttgtatggagtgcctggaagtaaatcgacaattgttggatctttcttgcagcaatggggtgggctgctcttgaactttgagcagtcgccctgttcagtggtctgagccccaaccattgaccatataacctccttttttgcccatgtccacccaagctgccaaccaggtgcgccgatatgccgaaattgttgataattaaacattgtgacaaca

SEQ ID NO: 7783 - DNA, 930 bp, Zea mays
acccggggatccctctagagtcaacctgcaggcgcaaggcaacgaggaagggcaaggcaggtgggtctgggactgggaggcaaggcaacccgagagcgagaaagcagccggccgcgacgcctgcgtcctgagacggatagatgcagggcgctccaacagtggatcggcggcgtgcacgccgatgtgaaagggctttgtttcttggaccgggctgctgcctgttgccagccttccgccctcgccgtgcgcgcgtagctgccttgcctgacctgtttctggtttgctgagtcgatccgtcggtcgatcgactgcggccgcgacctgcgatccatgcgtgtcatcccctgttgcctcagacgccagacaggcagcgggcaatgcagcggcgggaatggaaatatttggaccgccaggacggggacgttttgcagagtttaggagtatgtagtagacactcatcagagacgttggtggccctgcggaatcgaatcgtccaagggagggaggaagcttagcacacggacacagcggcatgccatgccaccaccggccgggccaccgccgcccacccacgtagtacgtacctccggccgcagtaatgatggcaccctgcgctgcgctgcgcgtgtgcgcgcagaaacgtgggcgcatgatgcctgcgcgcctcggttcatgacgacccacacagttagcttagcgttaacgaagacgaacgcacggcctcctgcgcgacgtgaggcggccaaagctcgtgcggtgggtgatgcatgtgcgcgcacagacacagtagcagtagcaggcgcctgtacgtggcgcgcgcgcgtcgtccgtcagcacgggaacggacgaaggaagtggcgtgtgcctgccctgccctggtcccggacttgtgatcgtgccgtcggcctcctgcaggtcgactctagggat

SEQ ID NO: 7784 - DNA, 823 bp, Zea mays
tagaagattgagagtaaagacagaaagcgacaggggattgtgagtgactgagtggccttggagacagagaatgtaactgtgagaatcctgcattccaacctgtgccactggttttcaatcgtgtcgcacagcacaagggtggggaaaactgagtagggactagagagtgataagatagaacactgagtttggagagtagtatgttaagaatgattcatggagagggctatagaggcaattttgcctaaccaaaaaatagaagggatgcctggtaaactggctagaccagatatgcaagtgtgcagatatttatatagaatatcaccattcaccaaactgcttgtaggtcactaacttcaagtgcagattatcaggagtatatcacacataccatggatgtggcaaggattctgagccttgtagcagcagctcttgcaacactggaatgggcacctgaaaggccaagcagagtgcgcgcatataattcattaacaaataaaaaatcaccgtggtctctatcacataacaaaggtgaaggttcttagttgcctgtaaactgcctctgcacaccataccacaagtaggaggaaatagttctgcctaataaggaagtatcgataaactctgtcttcttaccgggagcgggcgatgttaccacacaggatgcacttgggcttgttaaggccccggaggtttggcttgggcatgtcgaaggcggcggcaggaataggaggcggcttctgtggtgtcccattgctgttggccactgctggcgcaggagcaggactagcagcagagggaggcgagtcaccagccaccacct

SEQ ID NO: 7785 - DNA, 864 bp, Zea mays
cttgcatgcctgcagccaagcagctgttaatctcacatcctgctctgtccagaacccttcctcagccatggcataactcaaatcaagaatcttctcaaagagtgtcctcttgtttgacctccactcattcaggaacttgatcaaccgaccaacattcacatgaagatccttctcttctgcaaatgggtatgcctgaatatagtccttcctgtaaatagtaggtggatagaaagccacatatccaccaatctcccacaagatccgttgcgcccagtacccacggatcacatctgctgccattgagctcacagacactggcatcatgagcccccagaaagcaggtgactggaacaatgtattgaacgagttcactggtgccatcatgccctgaggtagtgccaccttcggggcttccgaatcaaacctcagatcgaacgccgaagttggtggttttctagtgaagtagaacaccgcatctacatctggcaacccgtccgacagcccctgctgaatgaattgccggccactgaagacctcggtgtagaacacctcatgggcgacctccccaaccttatcgagcggcagcccccttggccagaccgaccgctggccgaagtgcacgtaggggttcaccactgtgcgattgggatccgcgtggctgtactggagcagcactgggtggttggtgactccagatcccaaatccacgtcgaaatgcttccccagatcgttcccgggcacctcggcgcggtcgtcggcgtcgaagatcaccttggccccgtgctggatggcgaagaggtagcccgccgtcttgcggacgtgggagccgtagggcaggaagtcgacggagcggtatccgagctg

SEQ ID NO: 7786 - DNA, 788 bp, Zea mays
tgcatgcctgcagcagggaggaggaggaggaggcggctgcttctgcgccaccacgaagcccgagaatgtgatgagctgctcgctgctgctggtgctgcgaggacgaagagctggcgcggcgtgttcgccgccttgtgcgccgggccgcgccgacgccgactgcatctgcgcctgccgctttattcccggcccccggctgggctccaccgtcgtctccgcgtgacgaggtggatgacgaagcgtgcgcggaggcggagcacgagcgccggcagcggcagccatccccatggccgcttgcatcatgcgcatgtagctgttgtagccacctgctgctgctgttgcgagcgcccagcacaggccgccgctggcgctgggtggtgatggtgacccgtcgccctcacatgttcctgggcctgggcctcctcgcagcagcaccctcttggggctcgcgctcccatccatctcctcccgctcacgcctcctccccgcaccactgttgtttggctcctccattgcaaacacactacacggcaagcaaagcaacatgcatgcatgcatgcatggttggttcacaacttcttcacatcgtgccgtgtacgtgcaggagaaaattaaagttgctagtaaaactgacacgaaccaagttgatcaaagtagtttttatactaccaccacctttctcgaatattttgtagttcattttgaactaaaacatgacaaataaaaaaagaacggaccaaccaattagctagctggcatgcatttgtagaaagacattccatcaagat

SEQ ID NO: 7787 - DNA, 752 bp, Zea mays
gcgcatggggcgcgggatggggggtgagttgtgcgcgagcacgacgcacgcgatgcgtcgggtcggggccaggccaggatatttcggcgtcgcgtcgcaccagccagcaacagacagcgggagctgggttcggcgtggaccggacgtacgtggcgtcgcggcacggcacggcacccgtcgcgtccgtgggaaaaaaaaagggtggaggggggaaaaacacgggtgcgtagggaccatgccttttgagttggttatgatcaggtggtccaccggctggaccaggcccattcgtccccgtctcggacagtgcagacgcgcaggcgcaggcgcaggtgtaggcaccgacgtggtggtacggggccgggccgggccgaggtggtcgctcgccgccgtgtcaagggtttgctgcgaacgcaaggaatcatccatcggttctttcggccggcgcaatgtgacgcgttaatgctgttgccgggcctggggtcatccatgttgatcgtcgccggggtgcgtcacgtgtgcgtttgtgtgtgacattcccattcggtgctcttgctttctctcattgttgtccagtgaaaccgtcttccctcctaagttgcaagctgtaagttgggaattgtagtttgttagaagctgtaaaatggagcaaacatgttttgagagccgcaaggttgtatgctgcttcagaccttcagtgcagctgcccagcttttacagagcggaccgtattagcgtcgaagagaaacata

SEQ ID NO: 7788 - DNA, 839 bp, Zea mays
tcaaaatcgaacagaaagaaagtgagcggagatgaaatcaaagggaacaaagggatcaagaacacaggaagagccagagaagctgtaccaaacggggatgcgaaaaacgcagttgcaggattggaagaacatgtggagccagttttgtgtacaaaagtagagccacagtttatagctccaccctatagctctggctctggtgtgtttgtgtttgtttgtgtaatgtatgagttacatatatccacatgtttatatacaaaaggcaataaagcaccaatggtacgtgaaaagcacattacaaaatgccaacgcgaagatacttatttcagacattaacagggccgaatgcctatctgaattgtaaggttatacataacaatggcatcaacgatgggacacccatcgtgtcgagatcatattgctctgagcttaagctgcgcaccgtgcataggatgcaaggttatcacggtatgcggcgcatgagcataggatggcacgagcccgaactcaaaccgctggaggatcatgcagagcgccatcttggcctccagcagcgcgaagttctggccgatgcagatgcgcgggccccagccgaacgggaggaacgcgccggggtccttggaggccctggacacgccctcggagaacctatcgggcctaaactcgcgcgcgtcgcctccccagatgtccgggtcgtggtggatgagcagcacgggcagctccaggatcacgccgcgcggggtaggtgacgcctccgacctccatctccttgtatgtttgccggacgacggaggtggccggcgggtacagtcggagcacctcgtagagcaccatggtca

SEQ ID NO: 7789 - DNA, 758 bp, Zea mays
agttcattttaggttcttgttgaaccagtcgagcatgtccgcaaaggcttcctcagcgctcttcacggcagctgcatcatcgaggctgtatctcacgctccacccatgcgccacgccagggaagaccttgacgaagtgaccaacctgtggaccaggagaaagacgacgattcaagatcagaagctccacagacacagggcccaacatgatttgaaaatagttagcgatgggagtgcatatgcacaaatgacacatttggcactagaggaatactgttttggcttgatttctgtactcaagcaaatggtctagcttgaggtttaagttgttgaaaatgagaacttacccctgagttcacagaaagggcttgctcgaattgcttgactaactctggtggggacctcacatccatctcagctccaagtatagagattgagcatttgacctctggtgttatattggaaaaaaaatagtagagttaaccaatgaatcatttgtactagaacagtttttttgcgcatctccagaattcaccagcagaaagaagtttgacctttgatatcgtcgacggtaacaaaagaagggtgcaacagtacagcagcctggagctcatttgcttttgccaactccacaacgacctttgctgagaatgtgagaggaaagcaagtgctcagcagaccaaaactctcagatgataataagacgacggttacagaaccagagatgcagtgaaaaatgttacttaccaccccagcaat

SEQ ID NO: 7790 - DNA, 819 bp, Zea mays
ctgcgggtgtacacataggtcatgcattgcagcagcattgtaaaacagttaaaatgaattacacaaaaaaatgcacttgagaccttttgttctttgcctaatttggttttgtggggaatctgagtctaatatttctttttgggcttctttcgtgtttcatcttcataagaatgatcgagttttttacgtgggcttgccaattctatcacaacacttctccttacccaggcttgggagtttgggacctgctatgttgaaacaacttaggcagagcagtagttgttgaatctgagtttaatattaatatacttgaaacacaagaatgctagaactatgataatacgtggatgcatcattttttttttgttatggaccctgaaattagtcttcaaacatttcagcttcactattcatactggtgctgggaagatcattcctgaaatacaaagtgatgggcaggtaaatatttttctttcagtaattttggagtctgaaggacaagcttgatgtagtggtgagtgctgcctcactgagtcactaggtcgcgggttcgaagcagccttcctgcatttcggggaaggcttgcctcagtttatcccttcctcaatcccactcatgtgggagccttcgacactgggtctgtcctgtttagtcattttaaagtataattatgataggccctttttaattctagaagactataatcatgcctcgctagttatgttgtttggtcatgagcaaagttaatgcctttactttgagtggttgtctggtaaggtttgttccctcatgtgcaactgatttttgtcttgcactctt

SEQ ID NO: 7791 - DNA, 745 bp, Zea mays
acttctcatttctttcaagagggcaactggacagaagccccagaggatcatattctacaggttattatccttgaccggccgacttccctgatctgttgctcaatatactaaaacagtttttgaatttcagggatggtgtcagtgagggacagttctatcaagtattgctgtacgaacttgatgccattagaaaggtacatgtaatgtaatcacatagcgttcatttgatgttgttctcgttttttttctctctctgaccatcctcactaaaccatgggaatacaggcctgtgcgtccctggagcccaactaccagcctccagttacttttgtcgtggtccagaagcgccatcacactaggctgtttgcgaacaaccacaatgatcagcgcacagtcgatagaagcggaaacatacttcctggttagttcttggcgcgctctccttttgtgcttgatggcttagcatacctaatctggatggatctgaccagaaacttccttttttcatctgaaatgtaggcaccgtggtcgattcgaagatttgccatcctactgagtttgacttctacctgtgtagccatgccggcattcaggttgatttcctttttttccattctccttctcgattcacccctcgatggaacgggcagggctgattgctgacttgaagtatatgcatccgttagggaacgagccgccctgctcactaccatgtcctgtgggacgagaacaagttcacagctga

SEQ ID NO: 7792 - DNA, 840 bp, Zea mays
acaactaccattcattccatttggagtgctgcttggaccatatcttttactcctatctgtacagatgtttagaaagggttgttcacctaatatctaccaatatagaatgagatattccactcaatagcttatcatattgcctagatcatacaccatacaggagaaatgctaaacaacatttgaagattttagttgtgtgtggtgaaaagcaaagaaaaaagttgatgtgagtactgatgaagactaacaatactacagatgacacaaccaacatgctattacagaaaacaacacacagatgagatccgtgcgtacctggtataccagacgatggagagcgtcgagccgcatctgtgggttgttggggcatacacacttgacatcttataggtccgccctggatgatctgcgcactgaaactacaagttctaagaagacgtccacctttaacgttgatgtgtcggcgtgtcgcaacggaccaggacacaaggggcctgtttggttcggcgatgggaggagcgagggaaaggcagaaggaggaggcgaggatggtcggaccggcggaggaggcgagcgaggcgaggatgcggggctgccggtggatggatggagggatggagcgtgggagggcggtgggctgggggagggcggcggggctgccgacaggatgcagggcgaggtgcgaccccgggcggatgtcgtggcgggggcggggggcgccggcaaaacccattgttggggtactgtgggtttgataaaaaaaaacacccccgccccctaacagttattaaacataattggaaaggggaggggggcatgcctttaccatggttagtcaac

SEQ ID NO: 7793 - DNA, 735 bp, Zea mays
cttgcatgcctgcagtctctaacatataacttgtgctacatgtaagcatgcccttcccttccttatgttactactgtaggcgttcacacccacatggttctgccgcgcctccgcatccgccccacatccgcccgcggtcgcacctcgccctgcatcctgtcggcagccccgccgccctcccgcagcccaccgccctcccacgctccatccctccatccatccaccggcagccccgcatcctcgcctcgctcgcctcctccgccggtccgaccatcctcgcctcctccttctgcctttccctcgctcctcccatcgccgaaccaaacaggccccttgtgtcctggtccgttgcgacacgccgacacatcaacgttaaaggtggacgtcttcttagaacttgtagtttcagtgcgcagatcatccagggcggacctataagatgtcaagtgtgtacgccccaacaacccacagatgcggctcgacgctctccatcgtctggtataccaggtacgcacggatctcatctgtgtgttgttttctgtaatagcatgttggttgtgtcatctgtagtattgttagtcttcatcagtactcacatcaacttttttttttgcttttcaccacacacaactgaaatcttcaaatgttgtatagcatttctcctggatcgaggatgatctaggcaatatgataagctattgagcggaatatctcattctatattggtagatattt

SEQ ID NO: 7794 - DNA, 760 bp, Zea mays
gattaaataatagacgctatcatgtcttaaaataagcacagtgaaccagaaagttcggcaaacatgttaactacagttgagtgcttactcgttgataatactataaactcggaggatcttgtccaacagatagttgaagaggcctccaaagattccaccaattatcccaaggactataattgcaattagatctggagtactgtagactgcaacagttgaactgagatcaaacatgatcaatccaccttgcccgaagagaccacattttccactacgacagaactcaatcagccccctcaataccaccgcaacaacagcagttgtaaagaatgttctccacaaaagagcacttcgccacctgtaaaacgatgtatagaaacatagtctttcatcatatgaaaaactgaaaaagaaatgtacacagactaatagtagataatagataactacgctaatatcatttttccaatttcatcaattgtttaatctattgtagttgtagccacatgcccaactcatgattatttgtcgaacaataaaaaagcatacaccaaatcaatgttaggtgaaaacggatagacattgaaagttgatagatattgcacctgcaatattgtgacaatccaagtatgcaagatatcaaatagttaaattagttagctgaaaaaacaaatgctaactttcctacaaagaggtgctaccatgatgctgcttcttcaagagcaaacagaacaccaccaacaagtgcacaaagggcagc

SEQ ID NO: 7795 - DNA, 822 bp, Zea mays
atcatatcctcaaattatgaaatcaataaccaccatactcagtactgataatcaatggatgtcaaaacatagaaaaaactgacaacttacacgatctttccctgtgtttatttcctgcaatgaagcacaaaacagaaatattaggcagtgctctatttcgcaccacaaaataagcactgtgtgcaatgttttctttaatgtaggtctattagaacattgacagtctccatctctccgatatgacacttcaatcaatataatgtatataaatatatgatattttgaacagaaagagttatatattattctgatgaatctagtactcaaccttattttacttatctgtatggttttggctattaacagtcaaagctaaaaatgattagtttaatacaaacctaaatggacttatatttgggatcagagataggataaagtcaaaagatggcatacataatgtactcaatttctcacactcaacataatggagttaaactcaacacataatttggggaaaaaactgtatcagaacgggaaaacttgcacttttccctttgaaaaaatatcgttattgtggtgcacaggcataacttgcaggatagcatgccacatccaattggattgccaacaaaggaatagcacacaagagcaaaatatcaatgttagtgtatccatggtgagacacggagtggatggagatgtagagttgtagacaaaccgcaagcatctgcgaattggtttgtgtaaggtgtagattctgttgctttgatgcttgcagcgcaagacggagcttgtatatctcaaccctgctcaggtcaatat

SEQ ID NO: 7796 - DNA, 847 bp, Zea mays
tgacaaaaccgcacccttttaatttgttgctaggccaggacacacacgaagcttcttacaagagaacaaaatagtgacacgaacaatatgcttattagctaattgtcttcgttgcataaactaatgctctatcagatacgtgcttccccaaatgaaagtggaatacgtactattctgtcaacaaaacacggtgcaagtggtgagatatgcagtgtggaacgaaggaaaataatcagaccggtgaactgatgagagcacgcgtctggaaacaggaattcggcgaacacaccactgtagtttgatcattagctagataacccgtttcttatattccacaattatgaccttttgtatcgactgagctataccaagtaaaaaacaaaacctgttcatttgagcacgttgtggaattagttaactaaaccgcatggctgaatattcagataggccaatttcttattccataattctgacccaattcgtacttatatcatatgaactaccaaccaaacaaacagcaagcgtcaatgcaggacttcattaacaagctagtgggaggatcagctcctcctcgattggctgacttttcgagcaaactaagtcatgcttcttgcatatgatttccatctcaaaaaaagcccatgcgtctaccaaaccattaatttggcatccagctcaacaacaaaagtcgcaacgctgaactcgaattagtcttttagctagcttggaaccttcagaaagagtgcgcatgcatgaagttaaactatccccagcggaattaagcacgtttcagaatacaaatgccctcgaccaacgcacaagactagcgtgcaccttgcccatcagt

SEQ ID NO: 7797 - DNA, 836 bp, Zea mays
aacacaccatgcaatcagacttgaatccattcctccacagcgagtaactgcgatttgcctgacgacgaagcaactgcgcgtgcgttgcgatagtggcgatatcaaatcagtttttttttctcagcgttgttgcgcagacatgcatgctccatggttcttgtcaatggggtcgtctctgcaactctgcgtccacccccccgccaccccttccaagttccaaccggcctttgttgctgcctccttagctgacttgctcctcctgcaacagagccaccagatttttttatcgcctttttttcccagagaaagagcagaacatactccgtatgcaacactgatgtggcaaaatagtgcaggcagcactgaatgagaggaggcccccggcccattgctcatcctcgctcatccaccatcatcatgagctcatatgcgtgctgccccccgtccgagatccctttgcttgttttcggtgacaagctagctgacagctcccatacatctcacgaggagtagtttacggcatgtgtttaggggcagcttcactaatcttgttgtttagatagtgaagctgtccaagaaagggacttgcttgcacgcatgacaggagagcgaaacatcactaaacaaactgcacacacagagcaatgatgatcatggcacacatgtacactgcatcgcacacaaagtgcgtgcactgtttgagatgcaagctctcggctcctctcctggttcgcagtaccagttgcagttgcagtttgtgtccgtccagtccatgcatgcacgtgggcccccgcgcgtgcatggggtggcgaggtagaagaagattaaactggact

SEQ ID NO: 7798 - DNA, 811 bp, Zea mays
attatggaagctatattagcacttacctagtttgttagattgattaagtcctaattttttttagctctgactctctgagtccttgtctatatcttagttaacttcatgttttctaaattatttagatgactccactgtaaaggtagcattattcatgtttatgaatcaacgaagaaataatctagtaaatggttttcccaaacaacttggctatgataagagcctcttcttgatgggagaagactatagattagagggcaattgacccttacctcatgttaatctgttgccattttatgcagacactcagctattgcaatttatgattttttcacaaatttgattttacaccaaagctttcctgttgtagagggttactacataacataaaattccattgcatttaacaggtacgtcgaatctctcaagttgatatagaaacagaaattgtgtttaactgccaaatgggtagggggcggacaactactggtatggttatagctacattggtttacctaaaccgaattggagcttcaggtgagaacaaaatttactctggttcctgcttctgttatctgtgtgcttatgttatctgtgtagatcttattgaaaaacagtagcatgagtgcatgaacacagacagtcgtgttgggaactgtcatgtggttgtggtcttttagtattacaaactgatggcagctgattctacggagtacggactgcacattgtatcttaatatatgtttgctgcattatgtgctcacaatcatgcctgtacttagagtttttagatgtttgagcttttctgtgt

SEQ ID NO: 7799 - DNA, 800 bp, Zea mays
gcagaagatctgcttccgagcccaatacgactcatcctgctgaagtatctcctcccccgaacggcactggcaacaaccgtccgtccacctcggtgcggacttgatcaggtcttcgagtccaattcgatcgcgtaatcctcgctccggcggggttataaactcatgatccaacaaaccgcatgatccactccactgtcccacccgaccgacgaccccaatccatggctgcggcagaggcgccctgcgacggcagcgtcgcgcgcatcaggctgatgtgcagccacggcggccgcttcctgccgcgcggccccgacggggcgctgcggtacgtcggcggcgagacgcgcgtcctggtcgtgccgcgcgcggcgacattcccggacctgacggcgcggctgtcagaggtggccggcggcgcgaaggtgcgggcgatcaggcaccgcctcgccgacgagggcgtccaggacgtgatcgtctcggtcacctgcgacgaggagctcgcgcacatgcgcgacgagtacgaccgcctgcgggctacgcggccgtccgcgacgttccgtgtcttcgtcacgaccaccactcacgctggctccggccgaggcggtgcctaccggaggagatcggcggccggacttccacccctgtcgatggagatgcggcgcacgcagagcgaacaggtcctcgccgtgcgtgcacaccagcaacaggcgatgcgacgcgtcaagagcacgcaggagttcgcaggggccatccgcttgcagccgtctttccaccgccgtggcaaccagcagtgctgcagg

SEQ ID NO: 7800 - DNA, 813 bp, Zea mays
ccgcctcccgaggatctcgaacaccagcatgccgaagctgtacacgtcgcacctgtgcgtgacgggcagcggcagccagagctccggcgccgcgtacccgggcgtgccccgcgcgccggtcatcgtgaggtgggtgctgtcgcggttgcagagcctggcgaggccgaagtcggccaccttgggggtgtagtccgcggtgagcagcacgttgccgggcttgatgtcgtagtggatgatccggtgctggcactcctcgtgcaggtaccgcaccccgcgcgccgtgccggccacgatgccggacagcgcgtcgaagccgagcgcgtcgccctcgaggtcgaagagcacgcggtccagcgagcccttctcgaggtactcgtacaccagcgccttggtcgtggcgtcgaagcagaagccgtagaggcggacgaggttgatgtggtaggtgcgccccgcggtgcccacctccgccatgaactgctcctcggcgcgccggtccagcgtgctgttgaggatcttgacggccacctgcaccccgttcgggaacgcgccacggtacaccacgccgaatccgccggacccgagccgctccgcgtagttgcgggtgaactcgcggaggttctccggcgtgaaccgcgcgggcttctcccggagtatgtcgtccaggaaccggttcacggcgcccatctccaggacgtggctggcagcaatagcgtaaggcggcgccgccgagccattcgccgccggctgctggatcattggcgcgccagccgccgccgccgccgcctgcatctccaaggcctgcaggcatgcaag

SEQ ID NO: 7801 - DNA, 892 bp, Zea mays
ttggatcgttcgcaagcacctcaacggaaaacggatcagagcaaaggtgtttaggatgggaggacaatccattcgacgtgtctcaccaaatccacagcccttttaatttctatctttccgacgaacgaaattatacgaaatcatatatgtaaaaaataggcagagagaagtcgatcttttcggggaaaaaaagaaaaaagaaaactcccttgcagcttgcagcagcaatgctaatgctatatgcatgcaccatccataggaggaaggaggagagacaaagccacaaagaaaaccaaggaaggaatcaatgcgacgaacggaacagctactactagtgcatcgcggctgcggcggcggcgtacgtagatgaaacacgacgacgacgacggcggcggggtccgtcgtgtcgttattacctgggcggcgttgacggcggagttgagcagcgtcgggacggcgcggctgccgacgcggacgtccgcctccacggcgagcctctcgaaccgcacctccaccttgtgcgcctccacgcccagcctgcgctcgcgaccatgccagccagttcatcagggccggactttgcaactcatatctagaataatatgataataacagattgatcgatgcatgcagcatgcatgttactatagatcatctgttggcgcaatatatcacctctctttcttctcgcgaagcatccggaggaagccgcggttgtcgtcgtgggtgagcggcggcggcttcgtcgcggccggcgccgtcgtcgtgcccacatcgtaccagtcctcgtcctcgaggccgccgacgccggcgagctccatatcaccagcggactatagaagctaattaacagatcgaaactatctatctacctctgctgcaggcatgcaag

SEQ ID NO: 7802 - DNA, 882 bp, Zea mays
gcagcagcagctggatcttgggaacgtgccatgcattgcatcgttttccctctctcttcactggattcagcgaacacagcggtacgtacgtgtgggcgcgccatggcccaaagaagaagagatgaatgtggcgacgacagagttttctcgcgcgcactctgtaatcgtcgctcatggcatgcgagagggaatttacgggtggcgtttgtatatatatatggttgcaggacggcgtgcaggtacgggggcaagaacatcgccttccacgtgaacgagggctccactagcttctggctctccctgctggtggagttcgaggacggcgacggcgacatcggatccatgcagctcaaacaggtaacaacaacaacgacacgtcgatgcaaagctttgctagctcttttttttttcccttcacggttcacatgcaccactcgaccacgacaccgcacaacacaccacgccatggatgcgtacgtgaacgtgagagcttcattattgcggcgcagtgcaagggctttttccctcggctcgggcgctcggccggtgatacgtatgtgggaaggtgctggcgtttctttccatagggacatgcgggtgtttgtgggcatgtgatgagtgggatcccccccgcttttttctacacatgcatgcggctagggacacgggcgatggttttctggacgcagcagcatatgggccgtaactaggcttttgtctgttccccttttgtgcctgtcccgtcgcgtccattggccattgctggtgggaatgtgtgttcttctatgtatatatgatatgatagtatgatactatctcacacagaacaacaccacgggtggctagcaagtgtaggagggagctagactatcttgatgctgt

SEQ ID NO: 7803 - DNA, 786 bp, Zea mays
tggacctccgcgatgtcgatggggtgcacctcggcgccgccgcagcttgccttgccctcggccacctcctccttggactgctccggtagtatcaccagcgccgccgcgggcttcctgttcctgctgtacgccatgtacagcgccatctgtgcgaggccgaagacgaagcccagcacgttggggaacgccacgaacacgtccttcttcagcgcgccgtacgcgaaccagaccaccgcgctgagcaccaggaagaaggagagcgagatgggcatgaactccacgctcttggtccggatcacctgccgctgcaagcaagcaggtagttagtttattgaacgattacaaaccatttaactaataacagacaaaggaaaccaaaaggcaacagaagaatgaaaccattatgctgagcggcgcggcgaagacgctgagcgagacgctgacgcagatccagccgagcacgtgcacgcggaggccggcgtcggagagaagcatggtgacgagcgcgacgaggccgaagacggcgacgttgagccccagcagcatcttggccgccagcacccgggcggccttgggcgcgtacaccaggtacatggccaggtacacggtctcgacgacgcagcccacgccgttgatggtgaccagcagctcggcgccgggcttgagcagggcgtacaagatccacagcatgcagctgaagagcgtcaccacgtacggcgtcgactggaacccctccgtcgacttgttgcggtacacgcggtagaacgtcggcctgcaggcatgcag

SEQ ID NO: 7804 - DNA, 755 bp, Zea mays
atcaaagcacacaaagacattgcacattttgaaaccgcatatgttgtcaaactacaccgtatagcgacacttgcacctccacaacaggtgagagatcagacccgccgcgtgtgtttcattggttcagatcatatcacagttttacacattgccatatttcattcgctatttgtgacatgaaatttggtgatcacctttacttgtgtaggtttttactttcacccatccaaatttctcaccaaatgctagcaaccaaaggtacaccaagttgcaatttgaaatgctgccagatatgggttcatgccttgtgcatggtatgcaaccatactctacttgcaatttattattcatattgtttattaccatagataaataagttgtccctcacacgactatcccgcatcaatttggcaggatttgctggctattttgactctgtactttataaagatgttcatcttggaatcgagccaaacacagctacaccaaacatgtttagctggtaacctgcaacctgatctttacaaaagctggaaatagaatctctcaaacctcgccatcaataactgtatcttcatgccgtaacactgtcaggttccccatcttcttcccattgagaaaacccatctacgtgccggaagggtctcctatagaagtgcacttctggcggtgctgtgcccccacaaaggtaagcatatgtcatggcctgtcgattatgggatgctagagtttcttctaccatctcatcctcatct

SEQ ID NO: 7805 - DNA, 861 bp, Zea mays
taggcacttttccaccgctctgcctcactgcctgcatgcaaggcgggtgggaccttcgccgtccgtccaaccggcccgagcccagcgccagagagcacgcgtaccaatcacaccctacgccgtcggccgaggatccggacccggacccggactccatgtcgcctgaccatactgtcaccaccatgagggcccacatgcagtgcatccaggactagaccattcaacgatccacgtgtcggggacagaaatgtaattggccctgtcgcagggctctcagggagccaggctgccagggtacttggccgctgcgctcctccactcccctattccccacatcactccgcttttgcggccgcttgtggcggtgccttccacggggctgcggctgcgctccgccggagcgagcaaatatccttgcccccacgagaccctcgcacagtcgcacctctccgacgtgaccggcgccgtagaaccaccgggtcttcccttgtggttcgtgctctccctctctacccgggtcccgggctgctcccctctacttcgcaatcgctggatcgcacgccaagggcctggcttgcgcgtttcgatctgcatggccagagcgtttcatgcgcgtttgggctctctgatgtttggatggggaggaggttctagggtttggggttgagttcgcgatagggttttggggggtttgtagggattttcagggtttgcggtgttgtgcacggatcctgatctggggccaggattgtttgtctagattcctgccgttgcaccaggatgtctctctgcgtgattactggttactcaagttagtgttggctggcaccgtgcgatgtaggctgcaggcatgcaagactg

SEQ ID NO: 7806 - DNA, 797 bp, Zea mays
atcttgcatgcctgcagggccggtacagcttccccgccgacggcgccctcgagcgcgccgtcgtgggcggcaccggcggcttcaggatggcgcgcgggttctcgctgctccaggtcgccagcgccccgccggaggccgccgtcttccagcttgacctcgtcgtcttcacgccccgcggccaccgatactagcttatctaataacactgagagcactgtgcagagcgtgctacgttttgatctctatcgatcacacaatttgctgttcgtgtgcgttccctcgtcgcgacatgatatgcatggtgtccagattttacaaataattgagattattaggtgaggttctttggcatgaatgcgagtatatagatccatcactagtgacggtgagaatgtgccatgagttgagtatgaagtgtaagtaacctgatcacttgaaaacttcctacactgttcctcgctgacaataaagctttctcgtactcgctctgaaaccaatgtcaacgaagacagcattaaaacttgaagatgaaaaaaaaaatgatcttaatttggcgtcgtttctgctagtgctagggcgtgtctactgtttaggcccttcctcccagcaacccgatcgaactttggcaacgaatgcgttcggtgttgagggtgcgtctgcttctggctggtctagtggtgtcggcgtgtcgcggcttcacgggcacagacacggtggttccttcttgaccctcctacacccaatttcagcccattaagctgcttccctcaccaatgtactgcaggcatgcaagatgc

SEQ ID NO: 7807 - DNA, 782 bp, Zea mays
agaagtatacgcagagtggtggagtccgccccttcggcctttccaccctcattgtcggcttcgacccctacaccgacaagccagcgctgtaccagaccgatccatccggtaccttctctgcttggaaggccaatgccacgggaaggaactccaactctatgcgtgagttcctggagaagaactacaaggagacctccggcaaggagaccatcaaacttgctatccgtgcacttctagaggtatatcgtaattcataaataaatgcactttttaatttcctgcaatttatgcaacatgctatgaacctaatgcagtctaggttttgctgatgttttggtttgtgtcaagtgtttatgttctttctgtttaaggaacacaatataacagttgtagtcttgtagagcatgattaacatgatcagggataaccaaatgtgttacttttctctgcctataagactagattaaaccaaacaagttttcatggcaacaataatctggatatccatctttgatcaccgcctatcagatcatatagtttccaccttaattatgtcttgtgcagttgtgctagcaatcctggcaagctcttggagcaatagtttatcaaacgataaatctattccttacttgagttgtctattgagcatgagttgcttgactcatctcctggatttgtcattctagacattgactttgcttcaggtatttttatacacgggcaataagatattatctttaagtaacggcaggtttacatttttaaaaaaaaaatgtagtcgt

SEQ ID NO: 7808 - DNA, 910 bp, Zea mays
tccagcgcccggcgcggctgcttgctgcgccggccggcggtcgtcagcagcagcggctcgtcgtcgtatcgggtcgttattaggtcgctcatcagctccctctgtatgcggtacaggcggtgcagctcgtgaacctgatcagacgataagacggttagttgcccagaacaatggcgataatccattccacgttcgatcagtagcagcagcagtttctacttcatacttgcttcatacacttcctttccaggatgatgtgtgaaatatattagacaagtagcgacggtgtgaaggacagcaggagaaagaagaagaagaagccgaagtttctcggcgcgcgctttacctgctgccggaaggtctcttcgtgcttgagcatggccatcctcatgacctccatgtcgcattgcctgacgagctgcctgtccatcatcatcatcatcatagctatatatatccgcgcgctctccgttcctgctcgagcttggctctcgatcccggccggtcaccagattcttcagtgccgagctggcgctggaactatgcgcggcgcaacgacacacgaagctgtttgaaagagagagcaggccggagcgcaggtgttgcggtggtgggtttctgaaaccttggggtggcaggaggagcggatttataaacaccatctccactctccagggctcctccatccaacgcgcatggggtgcctttccgagtttccgttccgtcgctagtagagtagtagtagacactagggggggaggagggattaaaaattttgcacgcgcccccctctcctcctccaaccctggcaggctagctaatgacacactgtcagtgtcaccactcgctcgcttgctaagcaatggcatgcagtgccccgcgcagagcagacagggcctgcaggcatgca

SEQ ID NO: 7809 - DNA, 818 bp, Zea mays
ttgtcggcctccttcttcctgccggtgagcgtgagcgagggcgccgtggacgggtccccctcgttgaaggaggcgacgccgtacatggtgaggcagacgctgaggatggcgacgaggccggcggcgccgagcgcgccggcctggccgtgcacgggcgtgctgcggagcgggcccgtgagcgcgaagggccccacgaggaggtagccgtgcgcgaggccgacctcgacgccccgcagcagcgggctcacggcggtgcggtaggccgggaggttggagaggtaccacgccacgagcgggctcgaggtgaccggcgtctccaggctgccgatgaaggggtcgccgttgatgggctgcaccacctggtacgttgcctgcatgcgtgtacggaacaatcgagtagagcagtaagctagctagagagcgcgctctggaatggatagcatgcacaaattctcgcaagttctttttgctttgttgtctactgaccttctcgggctggatggccttgacggtgaaccggccgggccgcctcgtgagcgcagcagcgcctgacaggcccctcggcctcgagtgcacgacgaggctgctcttcatcacctggctcgccatgggagcgtaagctgtggccatctccaccgacacacacacacacacactgcaggcgcacggatcggatccgccggctaactcagatctgcctagctgcaaacgcgacgactactggtactagcggctgaggagggtctccttgggacggcctaagtgaagtctgcgatcgatctttaggaggaaatcctgtgcacgcatggatgcatggg

SEQ ID NO: 7810 - DNA, 845 bp, Zea mays
tttgccatacggtttgaaggagccaatggtcagaaggctggcagcagccatgggaaaacactggcacgtacgttgccgcttctgtgatcaccacggcacactcgatctcgatctcgggcagtggctggctggctccacgcacgacggcaacggcggccatcgaccgaacgaacagagataagatgacattgtttattgcatggattggtcgtagaaggcgaaagagctgggggggggtgggggcagccatcatgcatgctgttgaccgggcgccggaacttaactttttttttttttgcggaggaggacgtactctaacctctatctatctcttctctcaccagccgcgccttttgctttgccttgagtggatagggtttttaggtcaagaatatgttcctaaattcacagtaacatggaagacctgtcgtctgtgctcatcagatagaggagagcctgctatctaggcgtgtaggccggtacatatatatactgcgtctgcgtagtaccagctcggcgagacgaccatcggacacgtcacggaagctgtcgcaaggcaaaagatcacccttgtcgtcctcaccgcgccggcagtcacgtcgtcgatcggcgaccatgtcgtggcactccggggaagagacgacacaccccgggaccgcaataatctcgacgcgatcaatctcaagtcacttcattcggcgcagtgcagagttcaagcagccgcaaattgattccgtgcaggaacgatctctatctcttccctggggtcagtcacacggtcgtcgtatagtaacgtttaaagccgatcacgtacaacagatgagatgaggtcgacgagacgcaga

SEQ ID NO: 7811 - DNA, 747 bp, Zea mays
aggtaactacaaatatgtgcatatttggttttctttccccatataatgcatatatgtagaaaaaaattataagcacttattgggtcaagtcaagaagaaaactagtagagaagcagaggtttcatcttatatttttccctgctttagctcgtctagccatcttcaagtttaagggttgcagaagttaatatactcttgcagctacatgctatcaggtattcaggttcaaggtttgaatggctggtggtacactattttcacagaatatcagatagatgaagagctacatcaagtaaatgctgttagaagacaactgccgagacaaatgaaatatgtgtaactgcgccaagagatgttgatggagtgcctctctaagtaggagtcaggaagctatactattggtttgcattgctggtaaagatacacatagtgatattttctcataacagtctacctggtaaaaactaatagtgaaggaaacattcaatggatttcttccagcagaattcagaaaaaaacagacaaatacaggaagaaatggacctggaaaaggttgagtataactatagtttgcatagttgtatcacatcataattgttaaaagaaatttggatcatacagaatttaaaactccgcttaagaagtgcttaccaattgccccaattgcatccaagcgatctgcatcttgtacaattgcaaattcaagagtgggctcaacaatagatttatttgaaacttcatttttga

SEQ ID NO: 7812 - DNA, 821 bp, Zea mays
agctgcttcttgtgtctgcataacaaaagcctatctcaaaatgagcagcttttcttgatgactagcataaattttttatcaaaatattgtatgtttcattgagaatttttcatagtaactataagcaggtatgcaaatactgacatagcggacagcttcacatggatggatgtatgtccataaatatgaaaatttagggcattaaattgttgcttagaaaatattattctaaggtgttatgttacttggattggatcgtaagccactgaaaatgcttatggatttcaattttcaaaggaatgtatgtggcacagatacgtatatatggataaatgctgcaactggcataagaggctatgcacaactaagatgtaaatttcagccaaacaaaactcaaccatgcgatgcaaatcaagaatagcgagaacaaagtgccacggacaggcgacgaagaggccaagagtgagttcacctgatcctgctgcgcctgttcttccaggactttaagcacgatactgtatgatccctcctccaggaacacccatccatctctcccgtacagctgtatcattgagtataatggacaaacctgttagtattccttagagcaactccaaaagttccctaaaaaattcttccccaaaacctcttattgggggctgttgcaaaaaaaaaaactcccccaaaaaaatgttaacccacagcagaatgctaaaaacttgccctgaaaatttaaaaaggaatcacatgggccaaggaaagctgtattgggccacggcaagctatattgttgtctgcacttcgttctctgcaggcatgca

SEQ ID NO: 7813 - DNA, 860 bp, Zea mays
accgatttcgtccattggaagtcttaccagggcaagaataaccgcaatcactggcaacagaaggcttctgctgctggaacagtggatactaaggaaaaggagaatgctgaaggcaccaccattgcaaatgatgtacaagagagcaaagatccatcaacggtgaactcagctgtgcccatgccatgtccagttgtccagaagacaccaccactcaaaccagctaccacagaacagaagctgaagctggagttgccgccagttaccaatgcggcagcctatgctccatttgttctgaaaaggtgcaagtcagagccgatgcgatcatcggcgcgtttggcacccgatgcttgcttctggaaggaccgccatcggccgctgaatgcgactggagttgggttctgatccgtgccagacagctgctggaatgtgacatttagttaggtagtgagtgagtttgcgagcctgttgtgtaatagtagcgagtggttctttgactgtgctttgtgctgttatgtgatgtgtggacaccaccaaataatggcatgctgttaagttactatatgggagaggttctttgatcctgctttgtgctgttatgtgatgcttaccatctagacacatgcatccacatgacggagccccagaatcttgtccaatatctggctctggataacacctgtttaaatatgcttaaattggtaaattattgctggtggttgctaatgccacagcttacccgatccacttcccttcacagtgtttgtccaactatgttatatgcatagctgaaggaggtaaagatgtgtaatatttaatggagttgtgccatgcttaagcttggtatttgatatatttcaacc

SEQ ID NO: 7814 - DNA, 794 bp, Zea mays
aagcagaggttgcagctccttttctgcccgatgtccgagcagcatccagggtacaagacactgaagctgatttgcgatacacagcttgggatcatgacccagtgtttcctgggcgaccgcgcaaacaagccgaatgggcaggaccagtacatgaccaaccttgccctcaagataaacggcaagcttgggggcagcaacgtccagctgttcgactcgctcccacgggtcggtggggcacctttcatgttcatcggtgctgacgtcaaccacccgtcaccggggaacgtggagagcccatcgattgcagccgtggttgcgtctatcaactccggtgtcagcaagtacgtgacaagaatccgtgcccagccgcaccgctgtgaggtgatccagcagctcggcgagatctgcctggagctcatcggagtcttcgagaagcgaaaccgcgtgaagccgcagaagatcatctacttccgcgacggcgtgagcgacgggcagttcgacatggtcctgaacgaggagctggcggacctggagaaggcgatcaaggtgggcggctacgcgccgaccgtcaccgtgatcgtggccaagaagcggcaccacacgcgcctgttccccaaggaccccagccagccgcagacgaagaacgggaacgtgccgcccggcacggtggtggacacgggcgtggtggacccgtccgcgtacgacttctacctgtgcagccacgccgggatcctgggcacgagcaggccgacgcactactacagcctggtggacgagcacggcttccggtccga

SEQ ID NO: 7815 - DNA, 776 bp, Zea mays
ttagcacgtatcgtggctataggggtggtaagctctaaattttacactataaaatttaaaaggggtggtaagctctaaattttacactataaaatttaaatttaaagatcgaatcggattatgattacagactatttctatatatttttaaactagaattaattaagggtcctaactttttttaaaaaaacatttaaaacgtgatttattatcatccctaatcgtagcacatgacctatcttgagttttcgcaatacaaaagctagtacggagagaaaaaaacatcaaagcaacaataaaagctggaaatctcactgcaattagtgacgcaaaatgcaagatcataaaaaaagagccacatgtataccttcggaaacagaaacatggttactttgatttgcaattgcttttgacatgataatatcttctattaattttatttcaaatcataacactcacgccctgtttgtttacttgcagaattatctaatttaacttataaattatacaagcaactattgataatctaggcatttatattacataatccacctagtaatctatattgtttgtttacctctcaacttatttaaaccagattatataatctatagagtaaataaagaggaccttaaattcaaattataaattatttaactttcttaggtaaatatttttgtgatgtatctagatatagttgatatctagatgcataacaaaaactacgtaaggtcataacaaataatttgagacggggagagcagtgcacaagggtt

SEQ ID NO: 7816 - DNA, 740 bp, Zea mays
gaacggaacaatgccttgttgccttccttctcccccagcctcacaatcgagtcgcccccgtcccctttgcagattcttcgagcaacatggcaggatcattcattattcgaatcagtaaccgtgagggcaattctgtggtggtgcaggttctggagctgggaatcctggtgcactcggtgatcatcggcgtgtccctgggcgcctccctgcggccgtccaccatcaggcccctcgtcggagccctcagcttccaccagttcttcgagggcattggccttggcggctgcattgttcaggtacgtacggcatgtagtatctgtttatacacttcacactgaagtgaagagtgacatgacatccgaacagaaggtgacaaatagaccgagatatttgtagcgaagagctagctcgtcactatcactagctacatcgcacagatcagtgaggagaggaccaagaactaggaccccgtcaatcattgatgcaatcatggttcatataactcctaaccgagaacttactccaggcagagttcaaggcgagggcggccgtggtcatggcggccttcttctcgctcaccgctcccgcgggcatcgcgctgggcatcgccatcgcttccggctacagcaggcacggcgccaccgccctggtcgtggagggcgtcttcaacgcggccgccgcagggatcctggtgtacatgtccctggtcgatctcctcgccgcggacttcagcaacccga

SEQ ID NO: 7817 - DNA, 779 bp, Zea mays
cagtttgcatgcctgcagtagatgaaccagctgcaataggtgcgtcttcttccatttcctcatcagaatcatattctcctccacgtgttgctggttcatcttccttcatctcctcagtgttctcttcaacaatatctagaactgcaaccatagtattccttgcacactttcttctagtgtatgtttggctaacagtagcaccaacagaggcagcacgagcatcagcagcccttggcatattcgtccccttagatgttgagttgcaccaagagcctcatcaacagcctcccaaatggatttttcattagctgagatatttgggttgcaatcatggttgtcacggcactccgtcgtggcgagtcgcctccgggacgcctcgacgcctaggcgtccgcctaggcgatacttaggcaacagtagcagactagctgtagctcgtgtcaatccacccatcggacatgaatgtgcacccatactccttccaagcatcctcatgcttcttcttaagttctgttgtcatgtttcttccttccttgctttacttttatcccagaacttggtgttgggtttgcctcttgtagtcttgtgcatctttttgctgcccctgcttctctttttcacctcttcctctccattttccaattgcgctatcagtcttcacattccttgcatttttcttcaagtaagctgcttactcttttctaacaaccttaggtgcttttgggcacttcactacatcactaaaacccctagcattgtgttgtttgaaccttttgatt

SEQ ID NO: 7818 - DNA, 847 bp, Zea mays
acgcgctgaatgtggcattgctgtccatcttcggcgaggaagagatgcggtacatagaggagctgaagcagtgctacctgaccctggagaaggggtacaactcgatgccggtgaacctgccgggcaccctgttccacaaggccatgaaggcccgcaagcgcctgggcgccatcgtggcccacatcatcgaggcccggcgcgagggcgagcggcagcgcgggagcgacctcctggcctccttcctggacgaccgcgaggcgctcaccgacgcccagatcgccgacaacgtgatcggcgtcatcttcgccgcccgcgacaccaccgccagcgtgctcacctggatggtcaagttcctcggcgaccaccccgccgtcctcaaggccgtcatcgtaagttcttctctccctgccggctcatgcctggcaccagatcgactgcgtgcgcccgccgcgcggagactgacgggacgagctggtgttgtaggaggagcagcaggagatcgcgcggtccaaaggctcctccggcgagcccctgacgtgggcggacaccaggcggatgcgcacgacgagccgtgtgatccaggagacgatgcgggtggcgtccatcctgtccttcaccttccgggaggccgtggaggacgtggagtaccaaggtgaggcgtcaatcatactcatgcggtcatgcccctcgctgtcaaaaaaaaaaaaaaaaactcccgccaccgtttcacgttggattggaggcgggggcagtctgtccctgtcgtgcgctgctgcggatgaactggacggacgggacgcgttcctaaccgaaatgaatagacagactgactcatccgctgtgtgct

SEQ ID NO: 7819 - DNA, 906 bp, Zea mays
atgtcgttgtgctcgtcgctgtggtcatcttaatcggattgtttagcatgcagcactacggaacagacaaagtgggatggctcttcgcgccaatagtcctcctctggttcatcctgattggaagcgtcggggctataaacatacacaagtatgatagctctgtgctaaaagcatacaacccgatgtatatataccgttttttccgacggagaaagaattctgacgtctggacgtctctgggaggaatcatgcttagcatcacgggtcagagtcggatcactttgccttttttttcgcgggatgggggtgggggttaagaaatagggaagcttgcttatgtttcatcgcctctagtatatcaattgtagcatgaaaaaaacattttttccccctgtgcaggaactgaagcattgtttgctgatctctgtcactttcctgtgctggcaattcaggtaaaatgcattcggtatcgagtagccatatgtgtatttatgtagctgctaaagtgaagatctgtttgcagatcgctttcaccttgattgtgtttccatgccttctactggcgtacacagggcaggccgcctacataatttccaacaaaacacatgtggctgacgccttctaccgatcaattccaggtcccccccatctcatctacgacatcacacagtcctattcgccactactttaaaggcacagctgtcagtgtgccaccacaccagtgtctgctaggtgcaaaacactggcagcatattgcatcaagcattattttgatagtgcgtattgtcactgtgttgtgtgtagtagtgctgtgttctgatttggtggtgatagtgatacacgtttggtcattgcagctgccatatactggccggcctttatcatagcaactgctgcaggcatgca

SEQ ID NO: 7820 - DNA, 755 bp, Zea mays
aaggtgctacctgatctgccacctggccaggacagcatgagtgcatgacacagcagcctcacaagccttgcatccaaggcagacactatggcagatgccgccgcagtggggtccactcttgcggccttccttcggtgtcactccagcatgagcatgctcccctagaccctaatgcaggtctccaagctcgataccacaccgtccgcctcacactattatttgttagttttacaatattactatcttcttttggtttgtaccactctcatcaagttttgatctctaacctaccagaacttgaaagggactactttggtgatgtggtgtgatatagtgggcatcccaatcgaaatggcattctccaatagaggcctcaccccttcttttacactcgcagatatttttaccatgtcctagtctaatttttccatacaactgacaccaaaaaaaattggaggtgaagtacttttctagaaaacaaacagaagcaagacagtgtaaacaaggtgatgccaacaaaccaacatcaaagtctcatagatgccttacttttgttgatatgatctgaattttcttcatgaatgagaaagacaagctcccagtatcaccggttgacaactttgttattaaatggatgatacataggcaggcagctacctgttgaaatgaacaaataatagcaataaacatttcaaagtaccttgcaaatcttattagcatgattagtaaccacaagtccacaacactctactctt

SEQ ID NO: 7821 - DNA, 804 bp, Zea mays
atggacgcgctgtcgcggcgggcgaccatgctgcgggactctctgcggcgaagccaggggaacacggacggcatggtcaccatcctcggctccttcgaccaccgcctctccgcgctcgaggccgcaatgcgccccacccaggttcgcccgccccgtatcatgccccaccattttggacgcgtcacgccttcgttggatggaatttgaggcgggtatgattggtggagttgcaggtgaggacgcacgcgatccggacagcgcatgagaatatcgaccggaccatcaaggccgccgacggcatcctctcccagttcgatctcgctcgccgggtgcgttcgctgttcctctttcaattaacatgctagacgtttagccgaaatcatggtgaattggataaagttttcttgtggcatcctgtggatctgagggaatctgaatgaatgtgcaaaaaggccaggcgattgcgatgatttgttgctgaattattaaactgtgtggtaggtttagatttcggacttaatcagcatgtagtattaacatgattaaggtttatacgagcagttaattaggttcaatgcaggaatcactcatacaaaataactgttctcaggtcgaaggatgtaactcccgtttaaggatacattgtttaggggaatcaccattatgatatcagattgagttgccttgattatagcgtttcttttcaatggcatgctgttttgtgaaaaaaaatatcatccctgaactgttaaattgatggctagctgaactcattgcattgagcatatattaatccttcaagct

SEQ ID NO: 7822 - DNA, 878 bp, Zea mays
aacaagtagtcaccaatagtccaatactaaaccatttgtccagaaccttttcctagttgaggtcatgcataaaatattaaggcaagtcacataggaaatatcgaatggctactgaagcaacgtctcttttcacaagatggtctcatccataaaaaaattcttcttgttcctttggtccacagcttaaatccagataccaaatgaaaatcaagatagcttcttatgtttgtaaaagcatacacacacactaacaagccgcctttcaaagacaagatcaatgatataattaaccaaaatggtgtgtcctataacatacaaaagaaaagactaccatgccctacctatatcaatagatattaccatttaacttatgacttagttcttctgtaagggaaaacaccaaggcatattgatgcaaaagacaaaagaagttcataaatctctcaaagcaacttccagggactataattcagaaagagaagtgagatttgagaacccaaataaaccaaaatgatcatgaaaaaaataatgtttgctaaccaatctaggctttagaaacttactctagtgtcatctgatcctgatacaagaagcgaaccacttgagttccacgcgatagcattcacgcaaccaacatgaccctgttcaaaaacacaaaagaaagtacatctgaaaagcaagcaaagcaaaagaaaagaaacttcagctttttactcaacagcccacataaattccagcacgccaacataagattgccaacatatattaatgcacatggtaagacaatgaatgaaattgttacttagatacctccatctccttttccaaagcaagcttttgcactagagaagaatgaaactgtacttttttcttaatgt

SEQ ID NO: 7823 - DNA, 915 bp, Zea mays
aggcgacctgcagctcaactagtaaacaggtgggctcctgacatgcagtgggtggcggtgcagccgcttggtctaacatccaaggagacagacaaggttgctcatggcttatatgtccctccggtgaggccttgggtggttgttgatgatatgcctctttggaacgatgatgcagcacggcttaatcaagagttgtcggtagcacataccacatcagggtgagtaggatgtgaacgaatcaacttgaatactgtgcaggttgccaaaagcgaactcactgatgttgattactcatgaccacatttagagcttggagtgattgatgcaggccaaatgttcgaggagatgcctctcaagtagaaacaactcataaagaacatgttatgctaatgacagccacaattcctggtatcgcttcctcgtacgcacttgctaaatgcatcagagtggtccaatgggatggcaggtcatctgagtatctgacatggacccaaacgatgggttactgtggcaattaattcactatggattgcactggagtggtgagaacaaatcaagtttcaagcctgtcatcatggctgtgctcgctcatgatagcagcaactcattcccattggatgatgtcacagatcttgaggataatttgcttgattaaagacctcttgaagccaatgcggcagctcaggctgaactgaacatgttcagggctcatatggaaacaaaggttgctgcatgggaactgttgaatgaggcacatcatgcggatgtgtggaatgagggcatgccatttaacaatgagacacaggacaacttactacaataaatgccatgtgtagcacagaggaccaaagtcatgaaacggcaaacgcctcagagacaaaggctgttgcaaaataacagtgcttgttctgtctt

SEQ ID NO: 7824 - DNA, 783 bp, Zea mays
attggaaaatgagcttctccagttgtctatgttgatgggacagtaacgtatcatgcaaaccatttgggtctatggaagcacacataaatattccagaaaaatacttcctgctgaacatttgaggactgtcttattgaacctcgattcgacattcaagtatattgattctttcccaataaacgaagactcttctctgtaaatactgcatatttgattccattatcgtacgatactactacatttattcttgacatcgagctgatgggggaattgaaaaatgtgtctcccgcccccctgccctcctccaccccctcctccccccgacgcccaaaccacctagagctcacgctgacgtctactccaggctcggcggccacaaccctcccctccctagcgtcgggaccctcctctccagcttcgttgcctgttggcggcaaggtttttaagtcgagtcgacaaggtaccgacttggtgactagtcgataagtcagtcgtctagtcgtcgacttgccaatatattggctgttttgcgtatataatggcttcatatagactatatagcatttatatatgaagaaagagcatgttttacctcatttgaagcctgaaattgaacgaaactgaaataaacagcaagtcttacctcatttgaagccttaaactgaaccaaatcagccacataagtgataagtcataaactcataagtcataacagccatatagttcaaattggaaaacaaaatagccaggaaaatattagttcaaaaccttgaaagggaaaat

SEQ ID NO: 7825 - DNA, 841 bp, Zea mays
  unsure (1)..(841): unsure at all n locations
agcagcttagctatctaatggagcttatttcctttcaagtttgaactatattttcttgctatttgttttccaatttgaactatatggctgttatgacttatgagtttatgacttatcacttatgtggctgatttggttcagtttaatgcttcaaatgaggtaagacttgctgtttatttcagtttcgttcaatttcaggcttcaaatgaggtaaaacatgctctttcttcatatataaatgctatatagtctatatgaagccattatataggcaaaacagccaatatattggcaagtcgacgactagacgactgacttatcgactagtcaccaagtcggtaccttgtcgactcgacttaaaaaccttgccgccaacaggcaacgaagctggagaggagggtcccgacgctagggaggggagggttgtggccgccgagcctggagtagacgtcagcgtgagctctaggtggtttgggcgtcggggggaggagggggtggaggaaggcangggggcgggagacacatttttcaattcccccatcagctcgatgtcaagaataaatgtagtactatcgtacgataatggaatcaaatatgcagtatttacagagaagagtcttcgtttattgggaaagaatcaatatacttgaatgtcgaatcgacgttcaataagacagtcctcaaatgctcagcaggaagtatttttctggaatatatatgtgtgcttccctagaccccaaatggtttgcatgaatccgtactggccccatcaccattaacaacctgggggaagctcaatttttccaatctggcaggcaatgccaagctttgggccctgggc

SEQ ID NO: 7826 - DNA, 825 bp, Zea mays
atgacaagtgcatataatataatctagctgctagcaatcgataccctagtcacaagcaggagttttcaggtgggtgcgatcataacgaaatcgttgacaaacagcacgacctgctatctggatcttcaagctgtttcttcacctcttcaggaaggtttgcaatcctgacaaataagcaagcaagcaagaacgaagaacaggaacctttcatcaatcatcatcagtaaacaaacaactcttgactcaggagcagaataaaccacccagtacaggaggaatgaggggggcatatataacatgttaatatgttatgagcataaacgacatgcctgggtgccaagcgcagcagcctttttcttagctctggaaactcaggtacctgcgtggaccaggatcaagacagtttaaggaacccatggctcgaaatcacgatgcaatcagttccaccacggttgctactcacatcggcaatggtgacgatgccgagcccatggggacccagaccttcctcgatcttgtcgccaaggtccctgtccggcacctgcgcacgcccacccgccgccgccgccgaacggcacgtgatcagaatcatgagaagtgacacacacacacacacacattccctccctcccgagacggcaacactcaacaccggggaagattaccctgaggtcggcgaaggggatggtgaccgcgcggacggtcggcggccgctcctgctcctcctcgtgctgttgcatcgcgcggcaacggtgccggacccggcgggacgacgcgggagcgagggcgaaggagacgacctggccccgtgatctgcgccgggcg

SEQ ID NO: 7827 - DNA, 827 bp, Zea mays
ggtcagagctggaacgtgcctgcgaggacttcagcaacatcgtggcgagctacccacactacaccgtctacaagggaactctgtcgaccggcgtcgagatcgccgtggtgtccaccatgatcacgtcgagcaaggagtggacagagcattcagagagctgcttcaggagaaaggtcgtcatcatcataattgtggacaaaacagcccacccatttgggaatttgtgtgtcgtcgcaaattagcttgagcgagttattgctttgatgaatacaagcaggtagacgccctgtcgcgaataaaccacaagaacttcgtcaacctgctcggcttctgcgaggaggaagaaccgttcaccaggatgatggtgctcgagtacgcgccgaacgggacgctccacgagagccttcatggtaggcacaacagaagctcttcttgctaatacaaccacaccatgcattaattgagcttgagccgcagcagtagcagtgcgtgtcgtcgtagtagctctcaaaaacacttgcgcacgagtgatggactaacagctttgcgggggggaaacaaaacacgttgcagccgaggatttcgagcgcatcgcttggcgaggtaggatgaggatcgtcatgggactagcgtactgcgtccagcacatgcacgagctcagccctcccgtggcgcaccctgacatgcagtcgagctccgtactgctatctgaagacggcgctgcgaaggtacatactcctgtcctgtccagcactccagctctccatgtgtttagctagctactagctacagcttggtgttccaattccaacctctgagttcccccc

SEQ ID NO: 7828 - DNA, 856 bp, Zea mays
aagatttcgaataaactaatgtttatgtcgccaactaataacaatgaatactgttacctacaaacaagctgaatttgggataataaagatggacaacgaatctaacttctagatagagagagaaaaggagcaggtgtcggctaaaaatgggtatcacaaaagctattttgtatcgacagatttcattttgcagaaatcgttcaggcacagaattaaagatgatcaaagtggtcgaagaaaactcaaaacatgcatgtgactagctcataaactaagatatttagtctagaaaaaatcaaattgtcactacgaatgaccttcatttctgccttcttcacggttttaatcatgaatctatcgtcctgtgtaacgaagaagcagctcccactcttgcctggtgacgccagctcgcgaagcgtgtcgctcccgcagatggcgagcatgtagtccgcaggatccaccccgaacagcttcctcaggtgcctggcatcacacagcagtcaggcaatgtatccatgcgcataaaacattgccgttcttctccaaatgaccaaaatccagagccatcagcagagcaatagtgtggcacctgaatactgcggggcagtagtccttccaccggaaatccacggagtgatgcggcggcgtgagcttggacccctctggcgggaaccgcgtccaaaccttctcccgcgggtcgaagtctgatgacgagagcttcctgaacggcagcgccgatgacttccccaccgaatagctacggcaccaacaccacagcaacactgagacgcagggtatcccaaggaaggacagacggaaacgtagcagcggagcgagcattggtaccttacgccaa

SEQ ID NO: 7829 - DNA, 797 bp, Zea mays
aggtgtacgtaggttccggccacatcatcacgttcttctcccttatcccgtccgtccgtccacggcgcggcggaccccggccggcgcatcggatctccgccctatagttccctctctctgcaagtctcaacaaagagtgcacatgctgattgatatccactgcgagctagctagatatgcggatatatacccattccatctggctgcgatgcgatgcatgcgtccgtgtgcgttggatggatagatagatagaagatagatacgtagatcatatctctctctctctaagctagatgcttcccggcccaggacagctagcagacgcacgccagtgttggttctcaaactcagagctcggccgggcatcctagatacacatatatctccagcgacacagctactaaacagggttttcagaaaggaccacaccagaaacgcaatcgctgcgagtggtccaactaacgagaacggagctcgatctgaaccacctattggaattggaaccgacagggttggtgtgcgtccaaaagacagcgagggagacgatcccaagtgcgtgtccattacaccgcattcgatacctcttcttcggggatgcctgttgcagatgtccattacacgtacggtgcctgagtgctgtagtaccactcgcccgccggccactcgaaaggatgccttgccttgcctctaaggttcgctgccagctgcgctcaaggcttcagagacgaccatgcatgctgcctcgatctgcgtcagacgattcctccaactgatcaagcctgcaggcatgcaagatg

SEQ ID NO: 7830 - DNA, 792 bp, Zea mays
ttgcatgcctgcagataagtttcaggaataaaggggtattatgcttctagaataaatttaagaggatatagctgaagagatgctccaaacatcactaatgtatttttaatataggatatcctgcatcgactatatatcaatatcatagcaagtccaataaaaaggttgtagtagtcacaaatatatcatatttgtttttacagatttccatgttaagtttaatatcaaattcatatccaacatactacaagtgctctctattctacagtaaatgatagtaatcagatacagaggatctgttaccaattaataaagctataacatttggattagtaatcatatggaatgtaagcaacggatggctgaatataacatgaactcatataatacttggccaatgggggaagaccgcccccacagtctttactccgagaaacaatgtaagtcaaaccaacccataaaacttctgaaccccgcttcaccctatggagctgcattgtaacctggctctggctcagacccaactcgatgggctgccaaccactgcaactacccaaaaaccaaccacaggtgccacaatcccaaatcctcctactgtttttaaggttgccatcgaaggaattgttttttggtgccatatactagaagaattcaagtacaataacaacaaagccttttacggggtgtttggcatggctccgctttaacccagagcaactctgctctaaaactccaggatggagcagctctgaagtttttttggatttcggagcagcaaatgtggtgttccaa

SEQ ID NO: 7831 - DNA, 887 bp, Zea mays
cttgcatgcctgcagtgcctccggtatctgctcagtcccaatatacagttaaaccgcaccctattgggttggtgactgaaaaatctagtactcatgtcacaataagtgctccaccagctaaatctgagcctcctaagttacgtgctgctgaggattctgcgtcaagtcggcaaaaggataatgaaattgtttctgggatcgctgtttctagtaaatcaatccttgagaaggaggagagtaacgatcctttagtcacagtgaagcattcgactgtaataagcccgtccttgccaattcatggtgcaaaatcacaaacttcagtgacatcatctcctgttgtgaattcagtctcacctgtggcaggagttgatggaaaaagcatagaatctattcaaaggactggatcatttaatgataacaagaaaattgtcactaaaaaggatgtcaggatttcatctgaaccaccgaaagtacgttgttgtcagcctctttgccatgctatgtttgcgtttttcgtagtttagcatttgcttttgttcacatgtttgtatgttgtatgtttttccagtcagcttcatctgttgaagataaggtgcaaactgtaaaggctggaggcagtgatcaccaggatactaacaacctgaacaatgagttggatttggccagctcatcttcatgctcaacggttccactggcagtaagtaggatctttccagggaccgtttcagtgaatgctaacagcacagcagtaactggtgagatcttgaaacttttagaattgtacagggatgcctcttatttttttctaactcatttacgttggcagctgctgatgttcctgggacagatagaagctcaagaagaccatctcccgagggtactggtga

SEQ ID NO: 7832 - DNA, 528 bp, Zea mays
tcaccagtaccctcgggagatggtcttcttgagcttctatctgtcccaggaacatcagcagctgccaacgtaaatgagttagaaaaaaataagaggcatccctgtacaattctaaaagtttcaagatctcaccagttactgctgtgctgttagcattcactgaaacggtccctggaaagatcctacttactgccagtggaaccgttgagcatgaagatgagctggccaaatccaactcattgttcaggttgttagtttcctggtgatcactgcctccagcctttacagtttgcaccttatcttcaacagatgaagctgactggaaaaacatacaacatacaaacatgtgaacaaaagcaaatgctgcactacgaaaaacgcaaacatagcatggcaaagaggctgacaacaacgtactttcggtggttcagatgaaatcctgacatcctttttagtgacaattttcttgttatcattaaatgatccagtcctttgaatagattctatgctttttccatcaactcctgc

SEQ ID NO: 7833 - DNA, 811 bp, Zea mays
tcttgcatgcctgcaggacaatattctccagctgcattattttcagccactggttgcacgcaaagagatgtgaggcctgtcggagcaaaagcttgatgacgtcgtccttctcattgtacgccttcttagccgccatatcagcttctctagcacgagtttgtgaatggcggagtgcctccaaaatcatgtctcgctcagagccattccggagtgtttgtttgctttccaatccggttgtgctactgctagaaaaatgttgaaccacactgcacatgatgaaactgagatgaatgagtatgtgacaaggatactaaacaaaattatgaaaaaaaggaagacatttgaaagtcttcaagaaaggatgcatatagtatatatgtgaactgtgtaccctcttgctgacaatagacatgtaaaatttactaaggcttgataattgttgaacaacaaaaaaccaatattaaattagactgcatatcccaccaacagaaccgaagttatcaagctttattttctccttgaatgctaattatacttgtaatatgctgttgatgaaatcttgaatacctcatatacccatacataaaaggaaacaaaataagctgcaagttgagatacagttcgaaaaaagtacacctaatgtcgtgagggtaatgcagctaagctgaagaatgcacacctatatgtatcactgcttccatgctgttcccaaactccattaccatataacagaactaactcatttgtacttcctgtgctataggtacactcgatatggtcacaatgtccaggaacagggtgtgacactctt

SEQ ID NO: 7834 - DNA, 789 bp, Zea mays
ataggctggccatgagaggtctgtctcatccggagcgatgtcctctttgtgatcaagcttccgagaccatcaatcacttgctggtggtttgtgtctttgctaaacaattttggtttgagttcctcagtctagcaaatctggaggatctgtctccccaacaagttgatctctccttcgaaacctggtggaggaatagttgttctagagttgcagtccacctgaagaactgtctcaactccatagtcatcttgggcgcttggatcatttggaagcataggaataagtgtgtgtttgataagtgccatcctagtgttatttctgctgttagaatggctaaggaggagcttctgtactggtctatggccggtgctaaagctctctcctctcttcaggtccgtggttaggcttttagtgtgttggtcatggtagtgtttgattgtatcaagtgacagttgtgtgtgtcctctttgtaatagggtatttatcctcacccttttttcttcttaatataatgatatggagctctcatgtagtcatgtgtattcgagaaaaaggaattctcttgtgctaaataatttacacagtccagaattccagacatattgttctatcattttcttttctagttactgggctcatgtttgaatgtcaaataaatattcaaaagatgttcacccagatagcaatcagaagttccaatttgtacatggaaacccagcttataaaacagaacttaacaaagaaatgctaattcccacatttctctagttttaaaactgcaggcatgca

SEQ ID NO: 7835 - DNA, 826 bp, Zea mays
aattggtttctcggtgacgaactacacaacaggtagccatggtcagagtcaggtaacatttggcatagaccagctgggttcagcagtgaacaatagcagcggccatggtcgcagaggttttcagaggtcgattcatgcgcctgctcaagatgatggatgcaggctagtcctcgggctgggtccgacgcccgccccagaagttaactcttgtgattgtgatcagcagcctgccggagcagacaagtcgagaccacctgtaacgttgtttggccagagcttctccttcgctgatccaggggcgctcagccttggaattcatcgggggcgtgataatgctggagcaactaaacacttgggcgtgtccgtgcctgccggaaccgtcatctccttttccactgctgacgagggctccacgtctgccaggagaagctccggcggctacatgccattgctgctcttggcgcctctgccaaactattcgacagctgaagaggagcagggtttgctagatgacacggacaacagtaataatggtggcactgatccccgcggttttcggttcagccctgaaccttcggcatccatgacggaagcttcctttggtggcgcgagctctgatgttgtgacggtggcaagcaatcctggacagcagactcaacgccggcatcccaagaagtgcaggttcaaagggtgctccaagggcgcgcgaggcgcgtcgggcctgtgcatcgctcacggtggcgggcagaggtgccagaagcccgggtgctacaagggcgccgagagccgcacggcctactgcaaggcccacggcgggggacgccgg

SEQ ID NO: 7836 - DNA, 803 bp, Zea mays
tcaccagcgccttgagcgctcgcagcgccttcttggcctgcaacgacacggttggtcggacgggatgagccggtttcgctttgcgcggaatttggatcgcaggaaagaaaactaagcacgtgataagtacaggggaggggcaaaaaaaaaaaaagaaggaagaatctcttgtgagcagtaatcagacgaggtgactgttgcatggtccctgtgctctgctgggcctgtgcatgtgtgtggagagcgcgcccacgcccacgcccacgccacggaagaagaggagatgaagggatcatctatcaatcaagaagagaagagaaagccatctagccactgaccaagaagcctctgaaggccgtctggatcttgacggcggcgccggcgcggccgcggggatccaagtccaacacgacccctccgccgccgaaggccggtccctggctggtaaggcgcacgacctcgacggcggcctgcgcggcggccacggccgcgtccgccgccgccgcggtggccgcggcgacagcgatggcgtgcttgctctgccgccgccccgtgtcgtcgtcgagcgacctgagccacgcggcctcagcgatcgccgcgctgccggcggcgccccgcacgaaaccctcggtcgccgcggcggaggcctcggccgagtcccgcgacggcctcgcgaagctccagcgcttcctgtccgcgggggccggcgccggggaggcctgcctctcctggtctttcctcccgccgccaagcaggctgcggaaccacctcgccgccttgcccatcgccggaattcgccttgc

SEQ ID NO: 7837 - DNA, 787 bp, Zea mays
actatggattgactgagtgggaatttcagccagcatactactatcaggttcaacctacatctttgcacagcactatgatagacactccgtttactcgattgcagtaacaattgacttctcatacattttcttctgacagttagcggcaacttacttgagagagaagaggtatgccatcgaatgttcatcatcaatggctaatcttacaacagaagttaatggagtacctgagtcagtaatgccttctgtatatgttggccaatatgtgcgcttgtttgagcaaggagatacagttagtatactaccgtaagcttcttgatacttgttttcaaaaaagttataacatattctttatatgaatatgaatataaatagttatgcctcaatctcattgcagcctttctgatactgaatacaccagctatgctttgtcagaagctgaaagatttcaagattcttatgagataatagcactgttcagaaaagcttatgaatcatttcagagcctaggtgctacaagaatcgcttctgtctgtagcggtggaatggccatggaatattatgcagctggggattttagcaatgcaaaacagctttttgataatgttgctggtctgtaccgcaaagagggttggaccactttgctctgggagaacctaggatacttgagagagtgctcaatgaaacttaattccccaaaggattttatcagttattccctagagatggctgcattaccattattttctcgtagtgaagaggaaaatcgagaaaacaaaattaagag

SEQ ID NO: 7838 - DNA, 831 bp, Zea mays
cgtcataaatcagagctcatatggcccatggatcggacacgactcaagttatatgatttttatcaagtgttattaccatgtaggagtatataatacttgatccgtcgtttaagaacatgaatcatcgttttacctttccaaagacagttgtagctttatctcaagtgaaactgttggtctaattttcatcaagttttattgaaaaaaaatcactaacatctacagtatcaagtgagtgcagtgtcaaatatattaattttatgctcaatctaatgaaatccagtttgttgatgctgtagatttttattgtattttctacaaaaactgggacataattaagaaacgaaatctgacttggaataaaagatagaactggcataggattagaaatggaaggatgtcgtgtactgacatctcgtaaaatgcatccagtagatggccagatggttgaccgtatcattttctagttcacagattgtagtgtaggggtaacaggcgttgcttcatgtgcccccacagctccacaaacagaaatgagttagcataggatatgcaaaaggtaacaacggcaagattaccaggaaaccgaagttgaagcccccgacgacggtggcagcaatggagaaggcggcgagctcgaggtcgccgaggtggccgatgaaggactgcgtgacgacgttgaccccgtacagcgcgatccgttggaaagatggccgggcccacgatgtgccatagcttcttcgactccacccaccactccagcgccgcccgcctcgcgcgccccttgatggcccccgtttcgccgagcgggagcggctgcaggcatgcaag

SEQ ID NO: 7839 - DNA, 807 bp, Zea mays
agaaaagagaagtataaaatcttttgtcaggcccacgtcttctagtaataactaataacctaagcactggctacttggctagaaccaattagcttcagcaccagtgttttaaaggcaacaaggcaaggtgaggcaagcctcctaggcgaataaggtgatcgtctaggcgacgccatacaaagatctcaatctatgacgccactaaaattatgaagcaggtcataccttaatatgtccaattctgcaataattagtagagtactaatgcgcaacataaaagcttctataggaagtgtacaagcaacatggaagaacaagaaagttttggctttgtaagagatcataggaagagaaaggagcatagacatcttggctcaatccagcctggcaggaagccacagagcagaggacaggaacagagatgcacccaggaagagcaaagcagagcttggccaggccgagcagctttccacttggcctcgccctgggtgtgtacagcacgaaaccaaagctgcgcaccgggatgggctgacggcatgcaatcgacccgcgcaacgctggacataggatgcaggtgaggcaactaccataataatctcgtactccctctcttccttatccttctcgtcttcaatccctctctattccagtattcccatgtgatttctgtgtgatctccttcctgcacacagataaggaacggtggaaggcgaaattttattgcgctggatcgatttcttcacacacgggcactggcatttccttttcccttcatgtggccgtgcaaggctattcacgagtaaggca

SEQ ID NO: 7840 - DNA, 543 bp, Zea mays
atgatgatgatgatgataaggaggatgacttcgtcctcgctgggtgcaatcggccggttcgagcggagcgtgacagtgacacgctagatccagatcccctgccgacgccagcggagaccaatcggttcaagcggctgcggaagggctctgcgacagcccatccggcgcaaactccccaggtgccgcaccgtgaggcgcctgacgctccgtcttcctcccttagcatcagcgacgacgacttcctaactggcggccagcatcacgagcaactgaagccacaagcctctcctcggatcccctcatcgctcagtatcgaagacgaggacgacgacttcttcctcgctggtgaccgacagccagagccaacactgcctcaagtgactcaactcaagcggctgcggaagggtcctgtcccgccacatctggcgccatcaccgcctcctcccaaggtgccaggacagcccacgatggaagcccctccagtaatgactgaagatgcagcacgaggggcggttgggagttgggaagacgagatcgaggatt

SEQ ID NO: 7841 - DNA, 774 bp, Zea mays
cttgcatgcctgcagctaccacagatggtggcacatctgcaagtaaagatgaaaacccaatgatgttctatacacaaaaatccaattgtcattcaaaaattattacaaaataaccagctagggactaaattcacaatcgacgagtcatgggcatttttgcagaagaacaaataatagaggcacataggcaaacagcatgcaagattataggcacaataagagaaatgaatgcaaaatagtcaaagttgaaatcagcacaccactcaggcactcacctcgaactggtcggtcctcgtctgttgtccaatcctcgatctcgtcttcccaactcccaaccgcccctcgtgctgcatcttcagtcattactggaggggcttccatcgtgggctgtcctggcaccttgggaggaggcggtgatggcgctagatgtggcgggacagggcccttccgcagccgcttgagttgagtcacttgaggcagtgttggctctggctgtcggtcaccagcgaggaagaagtcgtcgtcctcgtcttcgatactgagcgatgaggggatccgaggagaggcttgtggcttcagttgctcgtgatgctggccgccagttaggaagtcgtcgtcgctgatgctaagggaggaagacggagcgtcaggcgcctcacggtgcggcacctggggagtttgcgccggatgggctgtcgcaaagccctttcgcagccgcttgaaccgattggtcttccgtggcgttagcagggggatctggatctagcgtgtcac

SEQ ID NO: 7842 - DNA, 783 bp, Zea mays
tggcagcagctgatgccgggaagctcactgatactaatgcaccagtggatctgggaacagaatcgaatgtgatgcatacatttgaacttcctatatcattgtctgctttgcaagaatttggtggagccaagggcctgtttgatggttacatggcaaggaggcagaagatagaagctacaatggggtacaaggtgcctgacaacgatggaaggaggcatgctttaaccttgagtgtgagtgattacaaaaggcggcggggtctcctctgaatggtatctctgattgtgctggacgctcaacggattcaactatattcctggcgtcagcacctatgtgcatttgctgtgacaattgtgcagatcatctgcattttgccttatcttcctaggcgtaacataagacatgcagactacaattcttctgcataaatgttacctgatgtatgaccgattatgttgctgacatcacgtttacatctgtggattttgcttacatcttatccttgctagctgcaaaaaaccggattccataattagatgaattaaattcaatgtatctttcatttttctgattcatgttttacatggtctgatacatgaacatcagaacatacatagtggagcttgcttattaacggcctcatttgtggtccgaagaagtctttcttgctccaactattacttggttgttttttcctgtttttttcttttattgatccctctttgagactgttgtgttcatgctgaaattacagtattctgttgaacaccgcaatttgaaggt

SEQ ID NO: 7843 - DNA, 821 bp, Zea mays
gaccgccggcctcgctatttggctgcccagcagcagcgacgtcatactgtgtagacgaaccggaggcgagatggatgaagtagccaaatgagagagatgggagtggcaaggtagattggctatgtgcaacctatttataagcgatcgagtgccgtatgatgcgtgcggaccctccaccatgttcccagctgtagaaactccaattgttatctacttcctctattctaattaataatttatttgacttttcttaccaaatttaattaacttgtcttattcaaaaaatttagaaaaaaataaaaattcaaagccatacataaaatatattatataatatattatatgttaaacattatcacaataaaaagaaataataaatatattttttaataaaataagctgattaaagttagaataaaaaagttaaacgaattataaattgaaacgaacagagtaaatacagagtaaacaagtgtttgatttttagaggctaatattatattttagttcctaaattaataaatatggaaactaaaatatagttttagtttctatatttaataatttagggaataaaataaaataaaataaagagactaaaaattagtctatagaaaccaaacatcactaactattactattattggatacaaccgtcttaacatgtttggcaatggtctcgatccgaaagctctaaaaacctgttctactacgtactagtacagcgaagctgtgtacggagattacaaagacatttgtaatgccatttccagtttccaccagtgtgaaaggcagggaaaatcgtgagcttcgccgacatc

SEQ ID NO: 7844 - DNA, 814 bp, Zea mays
cagcgcacacacagctaagcttcctacctaggattgagctagctaggcgtgttgaatccatcgtcagtcgatcgatccgatctagcattagcattagcatcctccatgccgcagacaccttcgacccgctggtgcccgacgccggagcagctgatgatcctggaggagatgtaccggagcggcgttaggacgcccaacgcggcggagatccagcagatcacggcgcacctggcctactacggccgcatcgagggcaagaacgtcttctactggttccaaaaccacaaggcccgtgagcgccagcggctccgccggcgcctctgcgcccggcaccagcagcagtacgcgcagcagcagcagcaggccaccgcagcagcgccggcttcgagccctaacagcagcgccacccttcttgcacctccggcagcaggcggcagcagcgccccctgtgtgcatccggcggtgatgcagctgcaccatcaccaccacccgtacgcaaccagcttcagcatgccccatctggtatagaatcactaaatacagaatcatattagtaccaatttcagttaattttgtaccttgttagtgcatgcattcttgatgtatctatatataaatgtgcatgttcatcacttgattattattagggctacttggggcagcagggcggcgactgttacgccagtgctcaacccagctgctgccggcatggtggaccttgcaggagcaggagcaggagcaggaaatagggctactggtgcaggcggtgcctatggcggtggagctgggttatacaacagctgcaggcatgcaa

SEQ ID NO: 7845 - DNA, 836 bp, Zea mays
gcagaaagacagaaactgaataggactgactgactagaactagaactaaatcaacatccacagccatgacggccgaaagcagcaacccaaacaagttggcacgccctaccctaaaattaacaccagattagtccataatctcattcagagcatcagccacgctctgtttcctctctcccacccaaaacgtgtcagcccagggaaagaaaaaaaaaagaaagaaaaaggaagaagacgagcccagcgatcctactcctggggagtcaagctgacgttgatgtcaggtgaagccctgtacgccatgggctgcggcgaacttgcaggccagccgaccatggtgaagcccgtcgtcgtcgcgttcaggttcatggcgttggcgtggggctggggaggtgctgcggagtgcggcggcggcggtgcgtggaacccgtttccgggacctgcctgcgagatcggggtggccgcggtgagcaccggcggcgggggtgccacgggtgctggtaacgccggaacgggggaaggctgctgcatgctcatcctcctcctctggtgctgcttcaggctgttgggcaggaagcttccgacgatcacctgccatgccaaaggtttatgaactgaaccggcagagacagaacgtttcctgctctgctatctatgcttatgttcagtgtgtgtgtgtgcggtgtgcctgtggctgcatacctgtataggacttgcagcacgcagcatcccagccactacgccgccgactacgcggccgtcagggccagcaagagagacgctcagcccgccggttctcctccggccttcctcagccattgtgaaggagcccatca

SEQ ID NO: 7846 - DNA, 829 bp, Zea mays
attggagattgaggccccttcctgatgaaatgatcaagtactgtgcattgatactctgtccattgatttcatgtttgtttaatatttctttttatcattttccattttccgtcctcaccccagagaataatttccaccaagtgtatctcattgtgattgctgtgtgcagatatgctagagaggatacacactatctgctatatatatatgacctgatgagattgagactagtgaatgggtcatcatgtgaaaatgatcttcttttagaggtattttttttgttagtgctgcattgtcccttcttccctatctattgtccaactttactggacttgctcagtattctcttcctttggtattctcccctagattaatgtatagcactgaagcagctagctctgcaaccaattgtcgatattggcagggtgggcatttctttttttccctatttcatatgtaaattactaattttcactgtttattaatctgtgagccaagtgtagtatgcaatattgtataaaatggaagatgtcttgaattaagattcgtgtcttacctacctgagttgttgcattcttcaatgtgtgtttttggcctctagctgagttggttaggtggtttgagtagcactcctcaggtcctgagttagactccctattgggggttaaaaaaatcccccacgccgaagcacaggtctaaggcctggtcctggtcgttctcacatgggctatgatgccgctatgtatgggtgggcttggggttcaggggttttctcgatctgcgtgaggtcttcttaatataatgtcctgggactgtcttactcttacct

SEQ ID NO: 7847 - DNA, 812 bp, Zea mays
ataaattgaaatctaaacttcaacttttgtgtgattggacaattcgagatattctttttgttgttgttgagaccaaatgcaattcacatcaaaacgaaaatagcaacaacatctggaaaatattatcgaaaaagctttgcatgttgtcttatcaatatggttcagaaaatactacctcatcgtctaactctaaatgctactactcacaatggaggcaacatgtagttccatacagcagaagtactacctccgttctcaaatatttgtcatcggctagttcatttttgaattaaaacgtgacaaataaaaaaagaattgagggagtatgtctgattatattgatgcaaatcaggcaatcatattgctatcttttatttatgctcccgtagtaacgcacaggcatagaactagtaataaatataatgtttcaagtgaaaatatagatttattatctgcatgcatctttaattcttagcaaactacttgtggtgctccaaaaccttcagcagagttctagaacagactttttagaaaaggggcttgagactatcacttgtatatgcaatgcagttcataacgaatttataaattgtagtagcatgtcaatgaaatagtttagcactagttggtcattggaaattgccaaattggccatattgtagatataagatatgtttctgtgctgcacgtgaattatggtcacgaaacgcatcattcatgtcatggatacatattcacatagcatcattcatgtcatgatggatacaatcgcatagcatcattcatgattgtatagcacacagcagatattc

SEQ ID NO: 7848 - DNA, 852 bp, Zea mays
gccgatccactatagtcgacctgcagcatgaaataaaccagataaaatgcataagtgcaggcacaagcagcggagagttgaacagaaaaatgaatattttctgcaccacaggagaatttgtagtgccattataaaaatggtacattggggagaccagataagctacagatgaaattaagagcttcctgcactatacagaacaatgtggaccaaacaaacatgttccaggtgacataggtgcagatataaaaatccaatccaaatccaaaaccaaagacgagggaaaaaggaatatataaaaaacattacaaaccccatataaaaattatacatgttagctatcacaagtagtggaacatgatgggaagtattttttcaaattaaactgaaagcgttggaggactggaaagtaagccagataaattgatgtctgagggaaagtacaaatatatagcatagttagccctctaaagtactttagaaccaaaatctcacaaaatgaaaacactgacctaaccgagtcacaggttacaggagacatctgaagacatttccaggccctaaatgcagatggcatggcatcctgctttgagaaacacgaattttgttcagtggttttattactttgttgtgttaagttattccaatcttagacttggaacggaaagagctggaaggaaatgtctgtttacagaaagaagctatgccagctacgctgcgatggaatgactagaaagaaaactgttatggaaacactatcatccagcaagaaaatggaaaaaataaaccagaatatgtatagggggttagtttccaagatacagagatgcacttagatgttccaataatcag

SEQ ID NO: 7849 - DNA, 790 bp, Zea mays
tacatccccaagtcggtctttgatttttaggagttgtaatttattgacaagatttgtatgacaaaacatgccgccgtgtgttctgaaaatagatgtggattcccaatgttaacgtcaatactattgcgcgatccagtaaatatacttatatgtaatttggtcccaagtggagcccttgagtcgatggtgtgactacgtgcttgctttcctgaaggctgtagtatgtgttgcatctctggtttattactctcggttccggtgtcgatgccggtaatgctgccttgctgtgtgcactgggtctcaccgcacggctttgtgcgtggccaccggagatggttctgtcggtgccgctgccgctgccgctgccggtggtgaactcagatcgtgtcgtgcgtggttctgatgctttccaggatcctgtgtgctgatttggtcgctgctccagcgttgtcaatggccttgcagggatcgcaatcacaacacgagcgcgcaagctttttctggcgctcgctgccaggcacacacggtttagtatagctagcgatcgtgcctgccggtgccgtgtcaacttagtgccgccgcccccccaacggcctggctggccggccggagtcttttagacggcacggcacagctcctctccccacctgcaagcgcaaccccggagtgggagtgggagtggtttcgtcgtgggtccctcgcccatggccttatcgcgcagtatgccctccctagtgaatgcagtcaggaaaacgtaatggcaccgcgatggttgcttcgcttgctctgc

SEQ ID NO: 7850 - DNA, 886 bp, Zea mays
accaagttgagtgagctccccggtgtatagccgaagccttagctcctcgtcgctgcttggagtccaccttatcaaggtttgtatcagatcaatagggagttcatgccctggatcaatttatatttacccattaatttaaggtacatagtttctgctggatatataacacagaagagacccaaaagatggtcagctttaccttccataactgcattacgtacttcgtcagctgaaacactcaatgccttcagtgatatcgctaagttctgtgcctttttagcatcgagtatcctaacaaattgaggggtatcctttgctgctaaatcctttttgccgtcagcatttttcttgtcagcagcatgacaaccaaaaaggctctcgatcatctcctcattaaacctatcaataaattagtaaccggatgagttagcatcactgattcacctgatgttaccaatctttggtgggtagcaagcaaccagtaaagagatgtgcatagtacaaatacgacaacaataattatgcaatagctagctatgttccgggaggttggcaagattgtaactggaagcataaaactactctttccacacacacaaaaaaaacaagaaaaagaaacttactggaaggatcctgctttaatttgatcccacaccattgcttgatccggatttgcagtaactttatcccagaagaatggcttcagctttgttttattgtctgccacaggaggacctgcaacattccctgccttcttcaatggtggtggaccacgcgcttttggaccaccaggcatggctggtggtggaggtccagctccacctctacctggtgggggtggaggtccgggtccggcactacttggtgatggtggaggtccgggtcc

SEQ ID NO: 7851 - DNA, 893 bp, Zea mays
cccccctgcaggacgaggcaccttacagcacccagccatgcaaggacaatcaccaggagtattccgccaaggtagggtgtcgagttcgcgagagaaccaaatgacaggatcatgaactgctggatcagagcacctccagatttccccaaggggttgcacacaacatcaatagccgctttacctttcacctgttatcatgaccagaaagagttgagaacaaatgaatgtgaaggtttcatcaaactgaacattaggttttttttttttgccatgatcactaaaagcatataattttattctgtaggtttacgtgacttttggtagatgattatgagcctttcacttgacctaagtggctaagtcgcttatcagagtttcagagatacatgtacaacgggagtaaaaggcaaattagcacaatatctttcacatagacctaaatttaatataggtccctgtttccaacatcaaggaaattaatgtggctccattaaaaataggaatctcgtgttctataagttatgatatatgctgatcagtgatcacacctacttttctgatgaggttaagtaatcaggtaattatttttctgctcattggagcaatcataccaatacaagtgtcatttatggcaatatatgcatttgatatgaatctacacgagaatcggtaatttttggagactcaccttcatatcctcatccaaaggaatgtatgccatctctttgcaaggatcaaacagactgtattttgcactcttactgaaaatgttctgcattgctccaacatagactgccgcaagcaaaggtgtcatcccaaacttggtcataagaggagtcaatggctcaccaaacaaaatcagtgagaagaacccaactcctgtgaggagtaac

SEQ ID NO: 7852 - DNA, 783 bp, Zea mays
tctttcaatatattctatatcagcggaaacctgttttcagatggagattcctgactggtcatctacagaatgacatccatatttccaggacctaactgcattgccaaacataatgttcaatgtgcatataaaatgccatgtagggttaaaaactggcaggatatatctcatcctgttctccacatttgaccagcctgttttcatatttctggattctgaaggggaaaaaaccagaaacaggatgggagccaggacggaagtacctgggacagggactagaatggggagagggtccatctcacccgattttgtgggacccgtatttatagtcggaagtgccccatattcgtcaattagggataaacccagcaagcaacaggagcagttccccataccggaccacacacactggtcagcccaccagcccagctaagcaatgtgactgccttgtgtgcctgtgtggacagacgggtgttacctggtgccatgaggcccttgcacagcgcccagtgccccacctcacttgttgctgtctgtctggatcccctttaatctctggatggttgttgccaccaacgttggggttgggaagcataatattcgtgccgcaggcacccgatcttctgtgttgttgtctgcttcttgtctgcctcagcctgtgcccctgtggctttggctgtgcgctgaccgctggcctgctgcttgtggcttgtgccgcaacacacagccagccagagcaaaccagtgcctagcagcctgcaagagtaggactgcaggcacgca

SEQ ID NO: 7853 - DNA, 853 bp, Zea mays
aaccatcgatgcagtaaggtttaagttaacggtagctgattcaaatgattaaataactttggtttcatgaaaatatatcgatatatgaaacatggcatcagtgtgactttttttattttcttaattgtgatggaaatataggaagatattagtgctgatattttggctgcaatatatgcacagatgctgcgtaccatcaggttcacattcagatagaatgctatctccttcctcgttgtcggatggaacatagttgatggcagaagcagattctttgcttctttctgccaaataatctttgtatgctctgatcgcagcatccaggacatttcctgacgcttgtaaatggttttgtagaaccttgcaattaaggggaaaaggttttaggtgcataaatcctatggtaacaacaatggcaaagtcttttagttccaaataagttggataggcagtaggttagagttgaaaccaacagaaatcactaagtacaggtttagccgtttaggcacatagatagagctgtattttatcatgcactcctatttaaggttaaatatttgagctcaagccaacttatgttcgacaggccgattgaaattcaaaaggcactgaatttcgcagtcaactatgtattgtaaagatatcaagctagttgcagcacaaagccaccgtgattgattaggactaataatcagtaaacaatctatgtacgaaatttgatcgttaaacgcgcatcgacgcacctgccgatcctcgcccgggaagatgagatggagtgcctcgaccgggtcgaactccagcgggaagctgaggccgaggtcggcggcaacaatcgacgacgagcaccggccgc

SEQ ID NO: 7854 - DNA, 904 bp, Zea mays
aactaaagtgcagaccacgtcaaatttaggaaatattccaaaagtacttgccttctgaactactctgttcaagtacaggaagagcggaaccatgtggagcagaagaacaagcaatttatcgacagttcaagggagagaaaacataattcagcaaaccactgattgattagtcaaagcaacttttttttctaaagaaccaaacaaaattaatttcgaaccatttcaagcatagagatacaacaataacgaatttgattccaattgatattaaacaggtcaaatttgtggcaggacatagctttttttccagaaaatatacagcgactcccatcgcagaattgaatgcattaggtgttgaagaacaagcgatccaaacgtcacatagaaaggaacatggtgggggccgcaattaaagctagtacacaatgcaagaacctaccttaaaggctcaaacaaacaaccacatgacatgatggcaagcgattcatcctgaaacccaaagggggaagggaagggagtagaattccgagggatgtgttggccctcggaatagaaaggaatctccgataacaaacaacattgacaagtagagcatgagcatatatggcagtcatacagcgcaagtgttactgactctaccagaccagacattggaaggccgaaccgggattgcgattccaacttgtgaattagatggacgattggacatggaacagttgaagcgaagcgaattataactaacacggccgtgttgcgcgtggatggagggagggggaaggaaggaaggaaggaaggagaaggaagcacctgctgcgagccgccgcggtcgccagcgacgcggtcgaggagggaccagtcgacgcgcgcgacgtggtcgatcagcgccgagagctgcaggcatgca

SEQ ID NO: 7855 - DNA, 814 bp, Zea mays
  unsure (1)..(814): unsure at all n locations
acactatcgcggacacactcccttttgtaatccagcacaatgctggccagctcatgattctcaaaaatagtaatcggtgcactctgaggcaaagataaaagtaaggttaattgcatatgtgggcaaagtctttgtatacaaggcacttattaatatgctaatctgtctcatattttttggattctatctgatccagttttggtttagaatcagttgaccaaatagcagagctaaccccacccccaacacacacattaatacagggaagaagagctgccaattgatgaagcaggaaggaaaaccaaatgacaactgtctccaaacatgtagccaaaaataagtgaatgatggaccagccaacatgtagccaaaaataagtgaatgacggaccagccaacaacacgcggcatatcatcaatcaagcaaatataagcattatctctaccccatcttatttctgtgtagtttagagcaaagaaagactaagttgatttatacacaggctgctcttgcacaaaagcaacacaagtcagtgacattgttaggtgcctaggtggccaaccaaatatactaaaatctcagagatgtattccttgtccaacttgtgcatttgttgtcatgaataagttaaaaaagatacctcctaaataaataatatatatcatgagatgagccattgtatttgctaatctgatgaataaataagtgggcacctaatcattatcaatggcagaaataagcaacccccccccccacccccacccaaccagggacccacattccaatggccattatcttctgcnagcatgcaagc

SEQ ID NO: 7856 - DNA, 829 bp, Zea mays
tgacgagccgagctgagctcagcctgctcccacgacgtacacgcaggctcaccacaccacactacaccacaggccagccatggtggcgatcacggcgccgagctcgatcgagcagatcccgctgatgcggtgccccagggccaatgcggtgcagcaggcgggcgcggccgtcccgtgcgtggacctgtcggcgccgggcgcgggcgcggcggtggcggacgcgtgccgcagcgtgggcttcttcagggcgacgaaccacggcgtgccggcgcgcgtggccgacgcgctggaggcccgcgcgatggccttcttcgcgctgcccgcgcaggagaagctggacatgtccggcgccgcccggcccctggggtacggcagcaagagcatcggcgccaacggcgacgtcgggtggctggagtacctcctcctgtccgtcagcgccaacaccgtgaagatctcgtcgctgccgccctcgctccggtacgtgagttgttgttgttgcctcgtcttcgccgtggctcactcggcgtcggcgggtatgaatgatatgaatgatgcagggcggcattggaggagtacacggcggcgttgagggaggtgtgcgggcgggtgctggagctgatagcggaggggctgggcgtggagcggtccctgctgcgcgcgatggtggtggggcgggaaggcagcgacgaggtggtgcgggtgaaccactacccgccctgcccgctgctgccgccggtggactgcggcgtgacggggttcggggagcacacggacccgcagatcatctccgtgctctggtccgaccgcactgcgagcgtgcaagcgacat

SEQ ID NO: 7857 - DNA, 731 bp, Zea mays
aacatgaccttcaggctcttgagtttttaattactgaggaggagatcttgaacactatcaagcaactccccgcggacaaggctcctggccccgatgggttcaccgggcagttttataaaagctgctggcctattataaaaaatgacattatggcagctgtttcaactatttgggggagagacttcaggaatttcagattccttaacacagctttcattacgctgctaccaaaacataatgatgctattgctgccaaggatttcagacccattagtttgatccacagtttcgccaagttggtaactaaggttcttgcaaataggttgaggtgtcatatggaggggctgatctctaaagcacaaagcgccttcatcaaaggtcgcttcatacaagacaattttatgcttgtccagcagacagcaagatttctccatgctaaaaatcagcccagaattcttttgaagctggacatttccaaggccttcgactcggtctcttggcctttccttcttgaagttctggaaaaattaggctttggcccagtgtggagggatgtgataagtggttttcttatgacctcttccacccagatcctgctcaatggggtgcctggaaggttcatttcgcatagaaggggcttgcggcaaggtgaccccttgtctccgctgctttttataattgttatggatgtcctcactttgttgtttatcaaggctgaggagcatgggctg

SEQ ID NO: 7858 - DNA, 799 bp, Zea mays
cttgcatgcctgcagtggaggctcacttggaggtgaatgatggagctgctgatgctgatgcgtctgtgaacaacgctaatcaggtagtcactactgaaggattggaaaacagagtggttgagatggtggacagagaagtgaaaagagacgagcccagggttggagagaacatatgtcctagatgtggtaagtggggcatatcgctggaggttgctcaaatcctgtgatatgttcaaggtacaacaaggaggggcatctgcctagagtagagtttgcatgactaagatgccatgggtgtttatctcccctttccgtgggttgtccgctcatggtcaagatttccatgttattgaaagtactacatctgatgagggtatcaaatacatgtctgtctgattgagccttcattaccattactgctggggaagtttctgctaggcaaatagagaacgagttcaaagttaaagctggcccaacatcgacatggaagtggtatgctaaaaaagttaaaataaacaaggtccggatgaggttctcaaactctaaaaccatcgaggatttgactttttttcacagaaatgcaaatgaggcatatgccttctgtggggtctagagttgagaagtggaatcctgctattagttctaaaggagccctggatctggcttggttcaggatcacaggaatcccttctgaaagagatcttctcctaatgtgtgtatggtggcatccaaggtgggattacctttggaggtggataagaaaaatctgaatagatatgattatgttagagttaacatt

SEQ ID NO: 7859 - DNA, 829 bp, Zea mays
actttagagcaggggatgaattggttgtgttgttatgtttaatgataaagtggccactgctgccgcagccgacggccaacgggactcgggagcctagcccagagccacaagataacgcaggcgggagatactagcgcgtgcagcaaccaggtctagaagaaaggaagcccagctttatcctggagccaagaagccgaggtgagattgtggttggactggaaggtaggcggaacttcaaggcgaaagaagcagagatttagcagttggaaactgatatttgttttgtgccgtagggagcgagggagcagccaggcatggaggagcctgttccggctgatccccaagattttcttgaagccaaggagatcaggttcaggtgcctgcttgtctcaattcatgttactgcatacaaaatcttgctgatttcaactgtttttttttgcccctgaagaatcgttttctcgagttctcgtggcttatccatccttttatctgtttctcactttctctgttcttggaagacgctaatttcagctcagttctttgcaaatttctctgtaatacagtttatatagctatgtagttagaatcacactaaacactgttaactttagcaaatttcttagaatatgttaatcacgcattcacacacccgtgctactaaactgctattggtagctaacaaaccatttggtggttcacggcactggtcatttcaattcctcgcactagttcagttgtaagtgagatctcatgagctcgaaaatctcaatgctcggatgtttacagacaacatgccattgttcacttttaatttaattttagtgtt

SEQ ID NO: 7860 - DNA, 736 bp, Zea mays
tcgctggaggcgcgtaggcgttccccgcagcgcgctgcctacgccgtcgatcccgacgacgcggggccgttcgcggacttcctcaccttcccgcagtactcgatgtgcgccgtcatcgcggccccagagaacactgaccaccaccgtgagggcggcgccgtcgccgagcaggaggcgtccgggtcgaagccgtcggccgtggccgacgtcgaggcgacaatggtggagagccacgccaacctgcgggtgctgtcccggcgccggccgaggcagctgctgcgcctggtgctggggctccagggccaccgcctcaccgtgctccacctcaacatgagcagcgccgcccacatggtgctctactcgtttagcctcaaggtaaaactccacaaccttcttcctacatttcctcgcggacaattacaggcagctacgcgatggctctcagcccaaggagtatagacgtatagtactcgcacctggtgcctaggtttccgtgccttcttttttttccctggatcttgctttgcctccaacagctggttgctccaaattcctccgtctgtttactttactagttatactacggtttataacggagcagatcatggttgcaattctttgagtttgtgctggtggttcatcatacaggtggaggatgattgccagcttacctccgtgggtgagattgcggctgcggctcatcacatcgtcgagaagatcaatgaagagcaaaaca

SEQ ID NO: 7861 - DNA, 834 bp, Zea mays
atgtggtacatttttatctcttagaaagatttcgaattgaagcactgtactggagcggggcgggcgggggtatcatgtagtaggagttcgtcagatgtggtacattttttatctagtaggagttcatcagtgtatccaaagcgttcacggctggaggactaagtgcagcagagcaggcttcttcgagggggcctcatggctgcctcagttttgtttgctgctctggagggggctctggtttgaggaccatattttctgtgccggtgcaaccaccatgttttccctcaaattttcgaaatgaaacctgtcatatcagactagattagattcattagaacttacccttatgttgttgttgttgcatattttctgtttcattttttctcgctttagaactatatgagatgagatgagaaagacctcctgatctgagctactgtatattgttaaatgccaatgttcctagagtcccaagttgtttgatctgatatcttttgatgtttttgaaaagtccccgcgcctgtcttttcgatatctcatcagaatccggagctttggctgttgctatcattactggaggacctactacagtcacaacctgaaagctctatctaccccatgggctcccctccctccctccctactgaaagggtcatggtttaggccctggtccgtcaagtgatgattgcctggcgtccatttgtcttgataggcatgacaagccctagtttctcgccgacgtgttcgccggccacagtcatccggcgatgggccgatagcgatagcgatggttgggtctacatatactaaagcccgcccatccccccatcaact

SEQ ID NO: 7862 - DNA, 853 bp, Zea mays
caattattgccataaattagctagctataaggctgaatcaaagctagcttcctagctctagctatgaaaaaactgaaccagcaagaactgccttgttattttcgtagcctgattctgcgacccagaggttggcgtcaccatctttgaggacaaccgcggtgtggccggcgaaggcgccggtgacccacttctccagcgtctggaacccgccccaccggccccggatcttggagagcgccaagaagtcgcccgaccgcacgtcctccctccttataattgtgttcgcggaacgacgcctctcgaacgacgcccccatgtgcttcccaaggaacgccaagttggcgtcctggccccagccggtgttggagaacaaaggcgccacgtcggccaaggacagcagcgtcccaagcatcccagatggcatcaggaagacggcgatcccgtgctgctttacctgcatgcagaaagagagacagtcatgctgtctgtctgagcgtaaagagacagtcgacccatacgtacgtacgtattccatctctgccgcgtcctcccacgctttgatctcgaaggtgtggttctcgttcgacctcatgtagtagtcccaggctaccctgtagggcgttgcgaacacgtacaggtccatgcatgtccagctctgaggcgaagcagtctacagcaacaaggaaggaattaattaacgcttttggtgagatagaaattgccgtaaaggatattattgaccgaccgaatgtagcagtcccagttcatccaattaagattgacaagtgtacaacagaggaagaaaccgagaacaggacgaccttggaatatcatgcatgctttcatatttttg

SEQ ID NO: 7863 - DNA, 807 bp, Zea mays
aaaccggcggctcaactcgacgcgaactctgtgcgagcgaagctggagctcgcgaagaacgccaagctcgaggcgaccaagaggaagctccaggaagggtaccaagaatccgataacggtatgcgtgctgctgctgctgctgctgctcctatggctataggatatccatccttcattgtgctggtggtggttcatgcattgtgctgtgctgcttgatggaccgagaatctgatctccatttcttttttggttctctgcttcgcgccaccgcagcgaagaagcagaggaacgtacagatggtgggtccgcagaacctgcccaagcaagggaacacgaacaacaaccgtagtttccagcctagcggtagcggcaagccaaggagtagcggcaacgtcaatagcaacaggaactggtcaagatgagaggcaccgattccaattccgattccaattccttcaagagcggcaggatcccttttctttttccttttctttttacatcggctacaacaatttttagtctaggccagtagtacataaacagcaataaggcttgttttcggaattgcatgtttggcatgtcacaatgctcggctggctggctggtctttgccgatgaaacctgtaaagataacactaccaaattctgatcttgagcttactatccatgctaggagtctaggacgctgcctgtcatcggaatgaggatgttctctgcttgctttgtcgcgctgctgcacccggctttttcaggcgcgggcgccttttgggagtagggccttttcgctgaattcagcgtagcttgtct

SEQ ID NO: 7864 - DNA, 1571 bp, Zea mays
aaggctgaaaacatgtttatcccttatgtttggctgtaactcaatccctgaaagagattcccaaaggtttagataatcaaccaagactcttactgtaagagcccccttaatatctgaaatccatttcctgtttacaagtgcttctttcaccgtccttttgttagcaattcttcttggaattgacttgtgcaggctaggggcaatatcagcgattcaagtgccatgcagccatctatcattccagaacaaggtgtttgaaccatccccaatcatagaaacaagagccatagagaaaaaagccctagctttgtttgggacctgtatgggaagacttgcccaaggcctccccatatctgttttctgcaaccacagccatctcatgcggagagcccaacaaagctcagggagactagagattcccaagcctcccaattgaaggggacgacacacctttccccaggcaaccaaacagtgtcctccctttgcttcctttgtgcctctccaaagaaaaccctttcttatcttatcaatggcatctaaggtccattgggggatgtcaattgccattgctaaataaactgtcatgcctgtgagaacatgttgcacctgaattctccttcctgctctagacattaagtcagctttccaattagggagttgatctgcaattctttcaacaaagggctggaactgctgccgagaaagtttatgcaaggaaagggggagccccaaatatttgcaggggaaggttgccatctcacaaggcagcaaactctgaacttccatcaaattcccctcgaagcattgaatacgatatgcatttgatttctgcacattatttatgaggccagaagcatctccaaaaagttgcaggatgtctagagtgatagaagtttcttcagcagtgggatgtaaaaacacagccacatcatctgcataaatagaaatcctatagagcttctttcttctagataactgctgtagcaaacctgcttcttcagctttagcgaataagaggccaagaacatccataactaggatgaatagcatgggggagagggggtctccctgcctgagccctctcctatgggctaaacgttcccccggggaaccattgagcagcacttgtgtagtggaggaggccaataacccacaaacaatatccctccagatatgaccaaaaccaatctgctgcatgacttcaattaggaatggccaggacactgaatcaaaggccttagtgatatcaagtttgaggagtaggcgaggcaatttctgctggtgaaacagccttgcagtttgttgtaccaacatgaaattatcttggatgaaccttccctttataaatgcgctttgaatcggagagaccagctcattgagccttttggccagccggttagcaagaatcttggtgatcagttttgcaaaactgtgcacaagactaataggcctaaagtctttgacctgctctgccccctcttttttcggtatcaaggtaataaaggccgtgttgagcttgtagaaattgttgaaattcctgctccaaactgccctaactgcaggcatgcaag

SEQ ID NO: 7865 - DNA, 891 bp, Zea mays
gcatgcctgcagccctgctgggcctgggcggacgacaccccacatgcgccgtgcatgacgatgacgatgacgatgcagccgcgagacaaaaggtccagcaccccggtgatccggcggccagctaacccaaccatctggaagtacagcagatggaacgcgcgtcactttcgtggctccgaacagttcggctttactagtttttatcattactatctggaatttacatcgctccgaactgaggggacacatataagattcacaatatattattattcgtaaatgttgcatatattgtgtattctgtttgtttgtttttttatttatgaagaggtggtggttgtacatgcgatcgaaatccaaatcaaaatcgtatgtctgcaactttgaggtcttattttgccctgcaagctaagtctgctacacacacgtgtggcacatatctataagattcggcttatgcgccttaatacaaggccatagacaaaaaaaaattataataatttccgtgcctcataaaaagaactgataataatgggttattaagatatgtctccaccacaatctctctgcttgttgcatctccttgtcaacagctcttgttagacagactatccctggctcaaaagtgaccagagacgtgtcactcccatcacacatggatcgagcagagcatgcactatcttttttttttccgaggactttgattgaaaccgactggattactccagagtcgtcctagaggttgttaggactccgatcaatctcgcattgcttcattatcatgagcactccaacttttgtcccgatgcagcagtgtcagcttagcacggcggcaccgcacccgcctcatcttcgcagctccgtttcctgcaggtcgactagagaggatcc

SEQ ID NO: 7866 - DNA, 798 bp, Zea mays
agggatgctgaaagtaattccatacctagaaacactttcatacactcatttgcctcaacaccagcatctgcacaacaataggaaatagaaagtggcttaaccagttcatctgtatgtcggaaataaacaaaaacggatgaaggcacagaaacgtgcaagggacatccacacagatgaacacacagcgcaattaacttgtatgattgtatctcatagagcaatccttatgggactgatagaaccccaaaagcatgatatctcttcaggtttgcagaaaccaaaacaggtctacagtttaaattatgtcaagtgcactccacaaagaaagcaaaatgaaggaaaatgtaagatgaatagaatgaggttcaccatttccttatcacactttaacctgtgtgactatccaaatcctctaaagacaatgcatcaggggcttaaccaaacaaaaggttagatccaatgctccacaagcagacaagcaataaattacagacaatgcacagcctcgatccagaaaacagggcaaagcctaacaatttagcaacttctttccacctcctttttactaatagagaataaactccccacgcttcaatgtcgcaaccaccaaattaagcaaggcagacacatctaaatgagaagcagcagcctctcggctacgctccacaggcatatccggcggaagccgccaggtcaaaataaacataaaaatgaacacacgccggaacccaacaagacagcaggcgcgtcacaacacgaatgggatctgcaggtcgacataagaatcgcgggtgcgag

SEQ ID NO: 7867 - DNA, 855 bp, Zea mays
agaatggaagaacaccctctgctgatgctagcgcaagagccttgggaaggtgacaagcgagaagccggtggtgcgaacaaggccttggtggtgtgtgcaggcgaccagctggccggcgctgatgccttcgatggcagcttcagcagcaaccacagtgcctatggtgacgagaagatggtgctgaggaaacgtatctgcgtgcgggagggagcatgccagtggcctaggtctgctacttccagtggcgccacggctggcagccctggggacctgccggagccgctgacaccgggtgcggatctgatcgtcactgacttcgacaccatgatcgatagcctcgcgctaccgtccatggaggagtacctacaggtcgatggtctccccacgccgacgtctgcctcgtccaccaccgcatctcccaagctccagctcctcccctcaccagcctcgccgagccaggtccagcagcctctgccgtcaacaaccatggtcgtgggcgacttcaacatgcagctccggcacatggtgagcttgtcctccttagcgccgtgcttcctgttaaaaaaaaacccagtcttgccacatcgctagctcgtgccacggataaaatgaacaatggcacacatgatcgttaagatgactgacctgtgcctggccattgttgctgccacaggacacgtcgtcgtcgtcgtcatcaggaccgtgcggtgccaaggcgctgaagctcgacgccggagctggaggtggcgaggttggcactgagctggtcctggcgacccccacctactgacgagttcttataaatggacagatgaccactgaagttttgcctcacctcacctcaccgccattaac

SEQ ID NO: 7868 - DNA, 761 bp, Zea mays
gaatggcgtcttcagttatctttcaatactccaccgtgaccatgcatggccgccgacgatgcagtcgactgcgctgtaaaaattgcttaccatttggtgttcttcttcttccccgtgctcgtgctcgtgctcgtgctcgcgaggcttgagtgacgtcggaagaggtgcctcctcgtcagcgcagccagctggcccatcttctttggcttgctcatgctcctcgtcgctgtcggctgggcactagatgcttttggactgcatcttgtggtacaacttgccggacttctgcatcaggctgtacgtgtgcgtccatatgaagaggccaccccgctgcccaatgcggagcaagacagattcactcagactgaagaactcgctagactcgtgtatgtatgtgggaaattaaacaaacaagatagttagccccttacagccatggacaaggacgagtaggagagactgcatgagcggcaagtgcttgaatcatccccaaataggcccgtcttcatcgcatacatccgggacaatgatcaagagcaggtttccgaggtttcctgtgtttgtcagtagaggccattactgatgtatcaactcgacttgcatgcagattgaacattatgtttccattatctaaaaaaatgcagactggatgaaacatgaacgtgcagtgacgaaactgaacctgctgagcagaaggccatgatcaagcccctgaagtgctgcggtggcttcaagatgttgcaagctatccagcccagagt

SEQ ID NO: 7869 - DNA, 897 bp, Zea mays
cttgcatgcctgcaggtaaagtgctgatgaagctagggaaggcccaatttgaactacaaaagtttgtggatgactatgtaaagtccttttacactgttgtaaaattctatcacaacatattcttcaatccatcatactatttaatgtatgatctgtatgtttactagtatttttttcctttctttatagcgtacaaatattataaatacaatcacaaatccatcagagtcccttctgaaagagctacaagtcgtagaggttagatctccctgcttatgcttttctcaacttcatgcatttgtgagctcaccttcaaatattgtcactttgctattttattgttcatattgcatttatcatccaaataaaagaaaaaaatagaactccttcctgggtcagcaatacaagcgccgccataggtccaggggtcagttagagtcgtcgccacaagtccaggagttagttagatctaaccccttattattaggatcagataatcttatcagttagttggagggtaaacagccgcacctgtgctataagggcgcgggtagtttgtattaggttttccttataaagaaaagagttttcggtcgtgggaactccttggtcaccgtggctgatcacgcagattatgaaggtgccggtggagttacaaatgagttcagcttttcacccccaatacaacagcagtccgaagtggttaaaagggtcatcacaatgtatttgcgatgcttagctggcgatcggccaaaatcttggcttcagtggctaccttggacagagttttgttataattcatcataccaaacatcactcaagtgctcaccattccaagttgtgtatggccgaccaccaccgaccttgcaatcttattactcaggatccgctaaagtt

SEQ ID NO: 7870 - DNA, 903 bp, Zea mays
aaaagcatgaattagaacagctgcaatctcttctatccaatatttaaagtattttttttcaaaaaaaaaggatcaaaacgaacgtacttgcaaagaggccaacacatatagctgatgaaggtgaaaaccggtatgttgcaaaccaagcaacaataggtatcaaccctgtggtaatcacagcaattgttgaagacaatgcccatccaagatacattgatgttgcatagggagaataggagctgttcttatcagcatcccaccctttatagcctagagcgtctaaaggctttgctgacactattgcaccaaggccaataattgatgcagtgaaaacagcaatggtgataacaaagagagcccgctgaaaccagaaaaagaaaacggtaagcaacactaataagtcttttcttaattgccaatattggatagttcgattctaaattatctacaataatcttagtaaaatctgtgctacaaattaggcattttatttgatgtgctaaaaacatgacatggccatgcaaatatgacgagcacatatggaaaagattgacatgaaatagacatattcaggtaaatccagttttcaacattagactgggtcgcaaactcgcaattcagtatctcggtatctccttctgactaaacaaagagattgaatagatcaacgttacacttatgcatgtgaccagaaaatccctagttggtagttgcaatcttataaagaaccgaacaacaaacctctttctctcctggagcttgactaacattttcacgatttgcaaactcccttccaggaatccagaaactgtaaccattgcgtatccatatgggaacagcaaatgagaggcaagccaccataagtggtaccgtgagagacaggcccaatataactgatgattt

SEQ ID NO: 7871 - DNA, 556 bp, Zea mays
agtatgcagcgcaaagcaacaaggcattattaaatcgccgtggctgttgtaaatgcggctcacacgcgcttcggcaggtgtgccctagtggctagttgctgcacaggcaagtcaaggacggccgcaaacctacggcttcgatgcattgcatgcggtaaacgctaacggactgcattgcgctgcattgatgaaagacgctagccgatcgaatccgacgacaaatctagcgagaacgtctgctgaggcaggtacacgcgtataccttatgtacacggtgggtgaaggccctgtcgatgtccacggcgcgctcttcgccggccacggtggcggcgacggccaaggcgatctccgagggcctgaaatccaagcagtgcgtccctgccacgcgttcgtggcagcaatgccgtcagaccgatcggaacggaatgcgccggtgtggttttgcatgagtaaaaaaaaaaaacccccgccgggtgagaactgagaacttcctggtcgttgctcacctctggcgatgcacaggatgagctccgcggatcggaggacggcgcgtctg

SEQ ID NO: 7872 - DNA, 830 bp, Zea mays
tgagctagagagcaataatgcagacgcatagtactccgccacacgcgttacagacgtccatctggccggcccctgcgaccttgttcccgatctcactgttgctggatcctgtcgggcagcaggccggggacgcgcggtacgtgttcgaggcgaagacgatccagaggatggagctcctggtcctcagcacgctcaagtggaggatgcaagcggtcacccccttgtcgtacgtcgactacttcctccaccggctccgaggcggcgccgcgccgagcagacgcgccgtcctccgatccgcggagctcatcctgtgcatcgccagaggtgagcaacgaccaggaagttctcagttctcacccggcgggggttttttttttttactcatgcaaaaccacaccggcgcattccgttccgatcggtctgacggcattgctgccacgaacgcgtggcagggacgcactgcttggatttcaggccctcggagatcgccttggccgtcgccgccaccgtggccggcgaagagcgcgccgtggacatcgacagggccttcacccaccgtgtacataaggtatacgcgtgtacctgcctcagcagacgttctcgctagatttgtcgtcggattcgatcggctagcgtctttcatcaatgcagcgcaatgcagtccgttagcgtttaccgcatgcaatgcatcgaagccgtaggtttgcggccgtccttgacttgcctgtgcagcaactagccactagggcacacctgccgaagcgcgtgtgagccgcatttacaacagccacggcgatttaataatgccttgttgctttgcgctgcatact

SEQ ID NO: 7873 - DNA, 900 bp, Zea mays
aaccttcagggcctgaagttaatgaatctatctggactccttcagacagaccgtggattaaagctgcctgtgtattaagcagatttctaattgacaacagttccccttcaaggtctgatatctccttagatgttctgattacaagaaaatccataaaaagtaattatttgagcaagcgaacagttcaggacgaatttaaaaagataacactgatacaaccctcaatcaataaaaacaggtacgctaatactagataaggaaatgaactttggaattgtcaaagcatttgggagaaacaaaaccagatgtacatataataagagcaaagatattatcaacacaataataaaagtaggtaaatatctccgcatacacattggtttaatggattaaatggttcagctcataaagaaaaaggtttgctatagcaatgaactactaaaaaaattaatagctgttttttgtaggtagcattcagcatgatgatcgttaacagctcttatgagaaaggaaaacaaaagtttgataaaagtacggttattagggcggtaaggcgggacgtggtgagccaccatcttgagttaacaaggcgacacctaggcgaggcgaggcaaggcgacgccatatgaatatgaagaacttcaatgctgcgcgtgaagaaggtaggaaaaggaaaataaaaaagaaaaagaaaggggaaggaactaacaaagcccagcccaagagaccaccaagcagcccatacatctgttgctgccgccggcacctctcctctggtcctccctgccgcttcccctccccttctcccatgccggtactgccccttgccttgcagatccctctccactctatgcagatcaagagcttctggcctgctactgcccctctcacatccctgat

SEQ ID NO: 7874 - DNA, 786 bp, Zea mays
acggccatcgccgtcacgctcgcgaccacgctgctgggtatcccctacccgcggagcttcccggtgagcctggtccggtccgccagcctcgtgttccagggcgtctggttcgtcgtcatgggcgtcatgctgtggacgccggcgctcatacccaagggctgcttcctcaacttcgaggaagggcacgacgtcgtccggtgccgcactgacgacgcgctcgaccgcgccaagtcgctcgtcaacctccagttcagctggtacctcaccggcacggtggtgttcgtcgtcctgttctacctccagatggcgaagctctaccccgaggagccgcagtacctgccgctggtgaagggaggcggcagcggcagcgatggccggttcagcatcggagatgatgatcacgacgatgaggacgacgtcgaggccgcaaaacgtggcggtttcggacacgtggttagcggcacgaggcctgtcgaaatcgagaggtgagggtcgtgcgtagcaccgtacaaaaggttagcatgttgttgcgtggttatagtgtaatttgacttgaacgttttttgtttattggtgaaattaaaacatgcaaatattctctagggaggttgtaatgtttatagtttgtgacacagtgacacttgtggattaaaagaatcctatatttatcctacctgaagccatcttatcctacttgtcagttgtcaccacgctaattcaatagtgtcaggcgttgaccattgactgctgcgatcgctaggctgtatgcctgcatggactggcttt

SEQ ID NO: 7875 - DNA, 843 bp, Zea mays
attgcaacatactttgcgttcctaggaatgtatacacgatggcttttcttcccagctgtttttggactgacaactcaactaatagattttgggtatgcatttcacatgcaatgcctcttagaaaatttagtgacaaaattgtttttctatatgttcttacttctacatttctcctctttacattgaattcaggtcattgcagtggttggttcttcctgctttctttatctttgttatttcttgggccgtcttctttctgcaattttggaaaaggaagaattcagcacttcttgcaaggttatacatggtttatattaatctaaaaataactcatattgatctggaaatatcaggctaatttcttcacaacggtttccttacctctatgatgccctccaacagatggggtattaattgttcactatctgaatacaaaaatctgggcatcgaactcagttccttgagtgattctcttactgttgaggaaaagaagttttgtgatgtgtctgctgagaaaagcaagttacaaaggaacgaatggttcggtgttctccttagaataaggaacaatggtatcattgtgctggctatcatctgtcttcagttgccatttgagttggcctatgctcatctatatgagattacagaaactgaggctatgaagtgagtatttcatatttttcaaatttgatatggtcaccttaaagctgtgcaactgaccttgctagccagcttttctaccctagtacttaataccagtttcccttgttttccatttctggtcatcattaaaatctgcactctattattctgatcaattttatatcatacaggtatttgttg

SEQ ID NO: 7876 - DNA, 874 bp, Zea mays
atgaccttctcttggtccggcggaggaggcggagctggctgcggggctgcctgtgatggggtcagggctccggcggcaggctgtgtcgccgcgactagctggaagttcttgaccgaggcgacagtcacccggccccggaagttgaggcaccagcactgaagctgctcgtgccaccttggggccttgttgcggaggatcaaaggcatgtccttgcactcttcatcgtcagcatcattcaatgcctggcctctgttcacaatgccatctcctgttatggcatcagagagccgggaactggtgaaatgcatagagtggtccatagtcgatgactttgacaaggacacactgctgaatgatccgccaacagagtgggctgcaatgctgtccggctggcaagggacactgccaccagcctcaaggcatgaagctgggatggagtgcattacacagttcatccgccttgggcctcgagttcccaagacattcagctcgtatgagatttgtgcaatactgtaccacctgcaagaaaccttggttgatcccttcttggagtagaatctctgacttgttttccctgccactgtttgactagttccattgtatggcggatgagtatcgtatattacaaattttgtgccaaggaaatttgacctgaagtccaaaaggcaacaacatatgtcagattaaaatactgtcaattctgaaaataaaacaatgttcattgaagccagtgcagcagtaccttaatttcccaatgtatgtgttgttacttgtacacctagatgtatcaccagaatttattgatattatatattctgtatatgttgcacggcagttcctttttgcggatagaaggaatttgccattttcgaca

SEQ ID NO: 7877 - DNA, 1057 bp, Zea mays
cattttgcatgcctgcaggacgagtcgccatttcagcgcacgccaacaaaggggcaaccgcaggagcgagcagtccaacatcccgtgacagcgacccagcgagcgagagccaagaaaaggtatggactccagcgcccggccttacctgaatcggcggtggacacgacgagggaggagctggggatgcgaagcacggtgacgacgctgtacacggtgagcaccagcaggggcacgaggcggcaggcataccggctcctcccgacgccgcccggtctcttgtgcggcggcggcggcggcgacggcggcggggacctccggatccacgacgagcagcaggagtgggcggagggcttctgatgatgctgcggcagctgcatcgtcctccggctctcgttctctccgttcccttcctcctcctctctctctctctcaccgccgcatgcttcgccggcgtcggcgctctccttgctctccctttttttttggctgccacgccgcgcgctgagctaaaacagctggcctcacacaccggggaccgaattgggcgcggggatatatgcagctggcgggaaggatagaatagaatggcgagggaggtgaccaactggaaggcaaaaaaattattctacccagttttttccccgattcattattcatgggggggccggaattcttgatgaagtgggggctattggggggaagggacacaactaatccttccatcccgtttgtaatacaggttgattataactgtttgccactttcattatttaatcactccaccattaccttgtatgctgatgcccacgaaactatgagagtagaccatcgcaggatcacaacctcctatgagaacagtgttccgtccaaaactaatcctcaagtactaaaaacatcatgcggtctccatcataggcaccactcaatgctccagagctctatttccaactagacaacattatcactatacagttacttccaaactttacttacacttttccatctaaaattatcatcactcaacttctaatagtttcgattccaatgcccatacaac

SEQ ID NO: 7878 - DNA, 830 bp, Zea mays
acagcggggaggaagctgaactggtggggggaaactccaattagcacccgagggcgcacatcataatgaacgtcaccaaagcaccctgtttctccttgtcctccgtgtgggcccgctgttctgtattcttcttcttcttcattccttccaccgctcacctcttctcctccccagtccccactcatcaaactccgcccccatgaatatgatcgggagaagctgctagcatcatctctcgcctccacttcgtcacctcctcgccattctattctatccttcccgccagctgcatatatccccgcgcccaattcggtccccggtgtgtgaggccagctgttttagctcagcgcgcggcgtggcagcaaaaaaaaaaaaggagagcaaggagagcgccgacgccggcgaagcatgcggcggtgagagagagagagaggaggaggaagggaacggagagaacgagagcccgaggacgatgcagctgccgcagcatcatcagaagccctccgcccactcctgctgctcgtcgtggatccggaggtccccgccgccgtcgccgccgccgccgccgcacaagagaccgggcggcgtcgggaggagccggtatgcctgccgcctcgtgcccctgctggtgctcaccgtgtacagcgtcgtcaccgtgcttcgcatccccagctcctccctcgtcgtgtccaccgccgattcaggtaaggccgggcgctggagtccataccttttcttggctctcgctcgctgggtcgctgtcacgggatgttggactgctcgctcctgcggttgcccctttgttggcgtgcgctgaaatggcgactcgt

SEQ ID NO: 7879 - DNA, 859 bp, Zea mays
ccgagaggcttttgagtcgaactgcagcggcggagcggcgggctgttcgcggggtaccccgtggtggggccgcagcaccggatgcaggcgtcgggcgggtgcgtggcggggcccgaggacgcgctgctgacggcgtgcccctgggacccgcgcgtgcggggcggcaccctcttccaccagaccaccttcagcctccccgtgcgccgcgccgtgctgttcgtcgccgaggtgcgccggcttcgggacctggagcccagggcgctgtgcggcgtggagctctacgacggcatcctcatacgctacgtgaaggcgtccacggcgcatctgggcaagcccgcgccgcgcggggaaccgtccggggacatggtggacttcgacatcacctactaccgcagccgtgactccgggcggccgcgcctgttcgaggacgtgctggaggaggtcgagcagatgggcatcttcaagtacggcggcctgccgcactggggcaagaaccgcaacctcgccttcgtcggtgccgcgcgcaagtactccggcctgccgcgcttcctgcgcgtcaaggacgcctacgaccccgatggcctcttctccagcgactggagcaacatgatgctcggcatcggcgggaggtcgcccacgacggacgcgcccgggtgcgcgctcgaggggatgtgcgtgtgctcgcgggacgagcactgcgcgccggagcagggctatgtctgccgccccggcaaggtgtacaaggaggccagagtctgcaccagggtgtcgtacaattgattggttgattgggcacgttcggatttatctatagaaacaccgatatttattagattagagatcttcatcgtacgagtct

SEQ ID NO: 7880 - DNA, 807 bp, Zea mays
atgggagcgacgttagggagggagttttggccctgaactacatatagaaccttctgactgtggcacgagcctacatatacctgagcattgccatgaatctgggacaaaggcacggccaggagcttcatgttcctgggcacgatgaactgccgggacatcggcagcctgatcaggaacagcttcatgcattccttcagggcaagacaggactcacacgctcaggtcgatcggcacaatgccgacgaagataaaattaactagcagaattttccacaactctgtacctttgccgcacggaatcgtggaggcatgtagggaaacgggatggcctcaaattcagatctccaccacatcccgatgcactgcccaatctagtcaaccaccggcaacgtgaaaggaagggtgaaacgtttgaggcatcctaacgtggcgtgatatctactgtagttgatatgtcatcactgaacaattggtaacatttctgaacaccatggttacctgccagtcttcttcttcaacggcctccacatcatcgacaacggagagcttgctggagagcttgcgcttgagccctcggacctctgaaacgcaatcagcatacaaacagaactctcagcctccagtgcatgtgcgcaggaattttgaacacaactaaacagcagcttccatatgcgcaggaagtttcaggttacagtggacaaattctagcaaattgtaaatcacaagtacacacaaagtctgcatgtagtctaccttcctcgccaggcctgaggcggcctccggggagcaggaaggaggagttccgga

SEQ ID NO: 7881 - DNA, 824 bp, Zea mays
ttgtacacttttcactatgtcaaaacaatatagatgcttaggtagcacatagcacattaacaatagatgtgacataaactgctgaatcaagtttattaaatcaagtttcttgaatcaagaattttaactatagaaaaaacaactagataatatagtctatcagtattcaataacttccgagaaaacaacttcctgccacaacagtgcttgctacaagattatgttctctttggttgaaagaattgggaaggttcacctaactgttctggttgctcagtgtcttgtggggtcaagtcaggtacttgttccaaatccaaatcaggtgtgaaactgccaaaccttaactttgtctgctcatattctggtacacgaagatgttccggaataataacatgctccacctcatgcaagttagcttgtgaaagtttttcaggcaacccgtttacatctgttgtgttggcattttcacagttgcttgctgaaggagatgcagcatcagctatactgttttctgcatcgatggtgggtgacttctttgtcaattttggcttccactccttaatagggtgtactgctgaagataaattttgtcattttatcagatcgtttgcctaaaagcattagataaaatggataaacaaactaaaaagctaaacaacaagtggcaagtatatatttttttttcaatttagcaatttcgtggcaacacagaatatttacagaaacagaattcgatgttacaaatttattgtcaattaacaagtatttcagtgaataaatcttaacaggtagttatatagatcttcatacgaaagcgaaaagta

SEQ ID NO: 7882 - DNA, 852 bp, Zea mays
aacagtccagatcacttactagttagccataggagcacaaactagggttagctatgagcctatgaccattaagcataaacaagtgctcagctggcagctgttatgactgatcaatgacacaaatacttcaaactgaaacaatgaagggatgtggctggatgaacataaggaatgccagagatttttgggatttttaatgtcaatataagatataacagaatggaaattcatgttcaatcaattcagtatgtacacaaacagtagggtgtagggatgcaaatacaacaattgttctctctacctacaatattgacaaagatttgtttccccaaaacattcattgatattcctttcttgaaggcttgcacttatgtttgaccaaatttggttgcaaaactcaatccaagatgtttgctcatagccatctcttaataattcttaatgagacaataggccttcatttacatcaaaagccccaagaaattataatctgggtttcattcttacactagccctagttcttcagtgctatcaattgaaaaaatggtacaaggaaaactgtgctcagccactacgggactgcgacgaacttgctggtcggctgccatgaccaaaacaaccaaatagatttctaagtaggcggcgaatccgaccttcaccaccatccacttggccatctccctctggccatgtcacccgcctcggcccaaccccgttactgaagccaccatccagctcagtgtagacgaccgggagctgctctctaggcccgccggcgaacctccccacggcaaatccaccgcgaggaagtcgccatatggtgagcccagcatccgcctccgcatctggggt

SEQ ID NO: 7883 - DNA, 823 bp, Zea mays
cactatgtgcgtgtttgattcaacttaaaggcaaattctggccgccagctgttacggaacttcaaatgtctagttttttaatttgcttctataaaaatccctttagtaaaaatcgtcgtgataaaaagaatttgtgacttctcaatttgaacgctatagactcgttgtctccctccgtacgatgcttaaaattttccttcagccatactcagattttttccatagctagatcttagcaaacctcattagaaaaaagcttaaccgaacaatgctactccctccgattgaaattagtaggcgttttagctctatagttttatgtctatatttatatagatgataataaatttaaatatatatagaacatatatattaactattgtataactctactattaaaaaggtaaagcgaattttattttgaaactaaggaaatatcaaggtatgagcctgacatcgtacaatattggatcagaccgtgcttagatcaaactaaaaaattatgcttgggaccgagcggtcatgccaatacatctatagattgctccatccctttatatattcccctcccctgcctctccgcaaccttcacttgccagttcccactcctaactctctcttcgtttactcttcttcccacccccagcgttcgcttccatccaagctcatatcatcatagatcgacggactaggccacgcgccccaatactcagaactagtcttgagtaaagcatggcgtcgtcttctccgtcctgccgtggcagcggcggcaagtcggacgtggaccggatcaagggcccctggagccccgaggaggacgagg

SEQ ID NO: 7884 - DNA, 804 bp, Zea mays
tgtcgtaaatgcagtgcttgtgtccttttgttttaaagattgaatttgttaatgtgtattgttgatttttttttgttttgttttggtccacatgttgttgtttaaatgatttataaaagggtgctaatttatgtgtatttggtcatccatattgagtataaatacaaaaaatatcctgatattgcattagatgcttacgatgaactaaattttgttattaggattattttgtctcaccatagtacataaaaccatattacttgtcacatatgttcattatgcttctatatacttttttttggtcacagatgtggaatgtgcaatggtaaaggaatgttaccttgtatagcatgtggatcacgtggattagtgacatgcaacacatgtactggatatggttccctacttgcacaaagcatggctcatgttcaatggtaatcttgagctcatttttccaagtatttatatcggtttctgtttctaagttgaggagattgttgaacaacataaaaatccaaaacatctgaatgcaaaagttgaagtttagtttggtaatttaaaaattcattcttatcgtttaataatcaagtaaatttctggggtaacaaacctatagcgagcagttaggaagttgcagatattgtcagttgatgctttctttgtgaatatatgtttatcgttacatcataaaatataatttattgagagtctgagactcgttggtgttgaggacttgaggcaacaaattcgttagtcttcctatgtatgctctataacatgtcaagtcaaataccaacagatatt

SEQ ID NO: 7885 - DNA, 820 bp, Zea mays
tcaccaccacaccttgccctaaattccactatcgccaacagtataccctgacaatccttaagatcatacgaacggtgctgctatacggtcaaatggtcaatgcatcagcagttcagcacggacacggagtcgctcgcttcatattgccacggcctagcagctcagcacggcgttcactgaaccctggcgatctgcgcggagaagcgtggccgcttgtatccctccccggcggcggcgacaacatgctcgtcgcggttgagcagcacggcgcgcatggccgcgcgcagcgtggacagcgccaccgccctcccgttccccgcggcggttgcgctgccgtcgtcgccgtcgtcacagacctccagctccaggacgctgcgggtcctcccgccgacggtggcgatctctacgcggacggggcacgcgttgctgaccgaccggacggcgcggcccaggtcggacaggagccccgggcggtcgtcgcagcacacccacgccctgacgcgccgcggcggcggctggatgacgtcggcgtccgtcccgatccctccagcgccgtggtgacgacctggacctgcacctgctggccgccaccggcagccgtcctcctcctcgacgcccacctcgtcgccctcccccgggatgacgccgaggccgacccccgccgccgcgtcgctcgccttctcgcgcagctcccgcacgtaccgcaccacctcgcccagcaacgccgccttgtccatctgcacgatcgagcgcgcgggtcgtcaggtcagccaccacacgtacgcatcccatgcatgctgcaggtcgactatataggatc

SEQ ID NO: 7886 - DNA, 841 bp, Zea mays
agtgactagtgaataatcagaaacagatgagctgacgtgcagcaaaaacatgcagcaaccgagcgataggataacagtactgacgagaaggcctaataaattgttcctatggcctagctatttattcccgtgacctatttcgattcctttctccagaaataaaaatgatccatggaggaaacctaaagaatacagtactatgctacgcagctttctctgctacctcctcctcatccttgtcctctgttgcgtccttctcctcctttgtttcttttctccccctccgtctcttctcccggaggaactctgcaagaatcccgagggccacgtcaccgttttcgctccgcagcagcatctcggagacctcggccggcgtcacctccaccgccgagagaagttcttgtatctccgggaacatcttgtggtcgtcaacgaggaagtagtttctggccagagttttgaaggcctcccacccgcagtagcccatgtagacgtgcatgtccatgcggcccggccgcagcagcgccgagtccaggcggtccttgtagttggtggtgaagacgatgatgcgctcctcgccgcacgtggaccacagcccatcgatgaagttgagcaggccggacagggtgatgcccctggccttcgggggagcgactcgcggctgggcccagttttcgtccgaggaatccgatcccgatcccgatcccgatcccgatcccgatcccgatgagtagttggggtccatgtccaggtcgttcctggacgcggcagcgttgtcgaagcagcagtcaatgtcctcgatgacgagcactgacttgttgggcatgtggatgagcagctt

SEQ ID NO: 7887 - DNA, 867 bp, Zea mays
tcatcagcgaccagcttctcggcggcgaggcttgcctccccgtcgttcctaacgccgcggcgtacactgcgtcgtccgttcattatcatcatcatcatcccacgcaagcggcgttcttgcagcagccagcacagcaggttgcgtacgtcgacctgacgaacgagtacgccgcggatgccactgcctgcgactgcgaggcggccttccgggcggcggagccggtgatgattcggttcgggggcgacccttcgccggtgtcggactcggaccccagccggcggccgctgctgctcacggtctcccttcctcctccggcctcgcacgcatggggcccggcggccgccgtgccgctgccactggaggccgcggcggcggccctggacgcgaacgacttccgcaagtaccgcggcgtgcggcagcggccgtggggcaagttcgcggcggagatccgcgaccccaagaggcgggggtcccgcgtgtggctcggcacctacgacaccgccgtcgacgccgcgcgcgcctacgaccgcgccgcgttccgcatgcgcggggccaaggccatcctcaacttccccaacgaggtgggctcccgcggcgcggacttcctcgcgccgccgccggcgccgccgcccgtcgcggccgcggccacgtcgtcgtcgtcccagaacaaacggaagctgcgcgacgccgaggccacagccggcggggccgccgagccagcagcagccagtaagtccgtcaaggcggctgaggcgtccggatcgccggcgccgccgtcgctgtcccccgcgacaacgacaacgacaacgaccacgaccacggcggcctcgacggtgacgacgtgctgctctcgctcgtggggtatga

SEQ ID NO: 7888 - DNA, 849 bp, Zea mays
cttgcatgcctgcagcagatgtggctccccctgcaaggaagcttgagtgctggaacacgcccttctgcttctgcaaacatgtcaaagtttcagcctcacttctgaattgctctcggtgttcagaagaattatgtccgaacttgtccgggaattaatcattcacctggcctatgtaaagtgtcttgcatgtactgagcacgaatatccacttggtccccttgacgcttctggtcgtgtcgactatctgacggctcagcttgtacatcagcctcttgtcctcgactaccacctcataggtttccctttctttctgcgcgagcacccagacgacgtgttttgttaatgcgataatatgaaatctgcaccgagcagattgttactgcctggatgtttgtcttttcacttgcaatcagaggaggaagaaacagtggaacttacagggccaaggtacttgatacattgcttgtgtaacttgaatctagggcaatgctcctctaagttgacatctttcccttctcctacatccaacctgtccaaagaacgacagagccgtcagtactcgatcagtaactatgttgttcattggttcagacacatgactagtgcacttttgctctctatctctctctctgtaccaatagaagaatggctgcttgctctggcagtggagccagcggtggtagtagaagtgcaggttgtggccataccgatgccgagggtcaatctgacaatcagaaatggatcaaaatgcagtttttgattgctcagcggcataataatctgcattatattacatttggagacacttaaattattggtacataacataacataccgcctcgagccagt

SEQ ID NO: 7889 - DNA, 827 bp, Zea mays
tgtatagaagcagctctcttcaccaaataattagcttcatccaatacaggcatccgttcaagcaaagatgatctgcgcatacaccagcattatccatattactattttctttgacaaaactacggaatacaaaattatcctcaataattgcaagatcttccactcacttcatcgattgatgtctttgtataatggaactgaattcaatagatctttgctgcaattcaagcacagtattccctttattttgcgcaactatttcttttatcctcctgacaacacaagaataaaaaaaatgatgaaatcatgctgccactttacagtgaacttgtttcaaggcatgcattacaagggggcacatagacttgaaactaaactgacaccgtgtaaacaaagctaaagagacgaagaaaaacaaaggctgttacactataaactcaatgaatatagttcttattgcagagaaagatcaaaatgacatagttcccaagaaattatgtgatccacagactacaattgctaaacgaagttggaaactgtggatctgttattgcgagaattgtgagcttagtgtttacctgttcaagtattgccaaacccatacggttcatgaacaaaaatagagaataaaaatagatcattttttataaaaaatagctgatataaaacaaactccatgtgagtcatttggtaggttgtcctgttatggtacaaagtatttaactatgacacaaggaccagttcaacaataacttactctgatgttggtggaaaccgggaggaaagcttcaaaagagagacaagacacatagccctagtagtaacat

SEQ ID NO: 7890 - DNA, 868 bp, Zea mays
tgtgcatccttcttatatcacaagctggggtcctcatgccaggaatgacaataacacttatgctattccagcttcaaggttatctcaaatccctaagctagctatatcagagcgcatatgtaataatgttttgcatttcggcgtagatcgagtaacatactgtattcagtggcgtatccagagggtggacagggtgaaccccagcccaccctctgattttgatcctactaaagtatataattttttaaattatttataaaattgaacaaccctaactttaaattttagattcaccactgattgtattcgtttctaaatttattttgtcgtctcagctatgttgtgtcgcccattgttgctgtcccagctggatactataccccaatgtaccatgaaggaaacagcatgtatctgccgccaccaccaggtacacgacagcctgctatcttgtgcgaatctgactgccatctctgatgttcgaaattatttaaaatgtgctgctcttgctatcagacttgaatcatggagtagccggaccatcgcgaagtagtgaggtaaactaaaccatctcatcatatgttgacatctttttcaagaggaacgaagattgattcaattaactaaactactaccttatttcatttattatggtccatgtttcagcgtcgaacttaattcatcagtagtaattgttgatcttattcctttgttcagatggaccaatctggttcttggaggccagctcggcggccacgtagaagcagacattaacacaaaaaatgtaagtgtccctatagcttattgcccatcattcgtttcacggcaattaatttacatattgtcatggacttggatccacaggtttact

SEQ ID NO: 7891 - DNA, 775 bp, Zea mays
tgcagacagctggaccaacactggattattgtgtatagcggcaacctctgtaccaccaactaggtcaacatccgatagatttagtgagctagattgatccagctttccttcttccattccggtgacagctttagcaccaacatcacgaccaatgattttcctttgatcgggcaactcaatgaggttcacatcttgtggcagcatatcaatatcgcatacctgtgttccttccttaaattgcaatttcaagttattattataagaagatattgtctgagttaagtcagttccctcaatcaagctgtccttgtgagaagctgttgatggtggcaattcggtttcttcagtgaagctctccctgtgattagctgtcaacggagataaatcaacttcttgcatcaagccaccctcttgcatcaagctatccttgtgagaagctgcaaatggagataatgtgatttcctgcctcaagctcttctcgagggcatctgttaacggagataggttagtttcttccttatattgctggacgaccacatgtggttctgcatcaacattatcttctgccatgttttcagtcacaactgttattccattttcttgaagaagcatcagctcctttggtggagcacggacatcaccagagctagtgttttcttggcaaaatttatcttctgtgttttctgacacaattttagtaaaaaatctctcagcagattcagcgcttaccatatgtgaagcttgaccagaagaaactaaatcaaatgtttcaact

SEQ ID NO: 7892 - DNA, 856 bp, Zea mays
gcagcaagcgtatcccgccgcgcgcgcgtgatggcacaggcaacacgcggtatcaccgctgcggccctcgggtgacgggtcgcccgtcacgtctcgctcgctcagcacaccacacccgtcgctgccatcgcgtcccctcctcgaggccggccggccggccggccgccgggggaccgcggagctgggactgggagacccacacccagtcaaagaatccccctcgcgcgcgctcccgcccagatcacgtgtcgctagcacgcctttgcgcctgatcggggccgtcacggacccgtccggccgtccctgtcgcccgcaccctcctcctcctcctcctcctcctccgtccgatcgcgtcgccaccgccaccgccaccgcggctcctcctccgacccatcactctcccgcattctcattccccgaggaccaccactcgttccgccggtccgtcacgtgtttcatgcgacgcgactcgcctcgcctccgccccggccccggcccccgaccaggctggccccgtcccacttgccggttcattggcacgcgctattaaagggggggcaaagggccatttgcgagaggaggaaaagcacgcgagagcttgtcggagggctctctgtctctgtgataaaccgatacgcagaggaagctgcggagaggtgtccctgctctgctggtgagctgcggccagcgggtgaagtgaagtggaccggacgtggacgaaggagagagagagagagagagaagaaagggcgccgcgggggccatggctggacacgcgccggcgagggacaagaccaccaccggcttcgccgctacgtgcagcctgctgagccagtttctcaaggagaagaagggc

SEQ ID NO: 7893 - DNA, 814 bp, Zea mays
gttgagatggacttatccaatgatctaacaccataaacaaattccaaagaaaagtcttcagatactaaaactcaacacagttgcatggttaagttgaaccccatatgaagttgaaggagctcactgtatggcttcatgagtcttggttacctctcccattatatccttgtcttccccatgcttctgcatccaaaaagatatattagagattttcagtcaaaactaagtaataagaaatcatggcaaatcacacaaattgaaatggaacccacacccaccctctttgtgttgcaatcttctgatacaagttggagctcttgctcttgcctccagcgttgagacatggtatggctactggtatccggtgctgtccagaacctgtaaaaccatccataatgatctctcatggaaaatagaaagacataaaaaggaacttttatatacaatttcaaaatgtgtaaaaaaatgaacttttggaatcaagaaaccaaaattacccttatattacaatcgggctcctgtcaacttgtctacttctcaagacagtcagtgaattcattagatactatgtttggtcttgacagcaagtaaatctctatagcaaatttctatcaagatataatatgagcagtcgtgcgtaatgcataaaaactttgtttttgaatagtaaaatttgatcttgaatccaaatcaatccttggcccatgtttatattcaaatacaatacacccatcactactctttcaagtaaagtatacaagttgactttaaagattgattttctacttgtaaagttggcgagctacaataaatc

SEQ ID NO: 7894 - DNA, 862 bp, Zea mays
ttgcatgcctgcagccggttcgaacggcggcggccaggagggaagctacacggtgccgccgtaccagaagtccgtggacggcctcgacgagcggtactacgagaggtcgtgcccgaaaatggaggagatcgtcgggacggccgtgatgaaggccgtgaaagccgacgagaccctcgccgccagcatcatccgcctcttcttccacgacttcgccgtcggggtacgtacgtacgtgtgtatctttcgttggtggtcggcgaatataattgacatggtggtgtgtggtgcagggcgtggacgggtcggtcctggtagacgtgcccgggcagagcgagaagtacgcggaggcgagcaggacgctgcgcgggttcgagctgatcgaggggatcaagaaggaggtggaggccaagtgccgcgccaccgtctcctgcgccgacatcctcaccgccgccgctcgcgacgccgccttctcggccggggcgccctactggtcgctcaagtacgggcgcagggacaggaaggactactccagcgccgaggcggccgaccgcgacgtccccatgggcggccagcgcgtcaccgagctcgtcgccttcttcgatacgaagggtctcaacatccaagacctcgtcgcgctttccggtgagtcgtgagtgcgagagcaatgcatatatcgatcgatcgatcgttcgcgcgcggacacacacacgcacacacatgcttgttaatgctaacagtgacgacatgcatgcactatatatgcaggagctcacacgatcgggcgcgcgacgtgcggatccgtgaggccggggctgtgcaagcgccggaaggcacgcacgctggaccggcagtacggcgactt

SEQ ID NO: 7895 - DNA, 909 bp, Zea mays
cttgcatgcctgcagaaatatagtaactagcaaagctaaataactttgtccatgttgtcttagtattgttctctgtgtaattttatattctgaaagtaaggaacatgtgcataagtactctcaatttagattgtagaatcatttatgcctttttcttgagaactacatccattgcacaatcgataatgttcctctcccgttgaaatattggaccagagaattatggtctcaagaaatgttgttgttggtgcttcttacggccttctctaccctaaataggtgaatggtgtttggcaaacgaagcagccgaatatgatggagctgtgcactgaagcgagaaagctaaaagagaacttccattcctttgagatcatccatgttcgacgggtatgcattgcatttatagttttacataagcttgcagactctttggttttgcatcatagacattattggtcaaaacagatattctttgcaccacaatcgatgttatttgcaagtgctggccacctgtatatgctttagttaagcaagctaccacagcaatggttgctttcatcagattgaaagaaaataataaaaaaaagaagcattagtttctattgttcttctaagtgctctgctgattttacccctttcctgcttctgaatgaaggagtggaatgctgaggcggatcgtcaggcgaacatcggtatcacgcttgcaagtactacacaacatccatcatccctcaattccagttttcttttcttattttcataaaaatcagtaaatcactgactacgctacattgcaggtggcgccgtgtttgaggagcgtggtgacatctgatacatagctagcaacgtatgtagttaactaactagcttgacctttgacttgcacctttgtcgagcttctatgctgct

SEQ ID NO: 7896 - DNA, 829 bp, Zea mays
tttatagctgtgtttaggtctagtttagaaactctattttttggagagatttatatttttataaagaaaaaataaattatttttttaagaaaataaaaatatcttattaaaaatatggttttctaaactagccttaaatattcgtcctgttaattgcttcgcggggctgcgttccaccagagatcgctatccagtatcccaaaacagagacagaactagaaacgctacaaaacaacaacaaaaaaaagtcaccaatcgcgagctcccttcggccactccaccatcatcagcaattcagggagcccgccggcccgccccgccccgcctcgttacccgcccacccaccgctgcttctgcccgactgctccatggaggggaccacgcaacccaccgcgggggcgcgggaaaagctgctccccacctccgccgccgcctctctgccgccctacctcgacccgcaccccgccgactcctcctcctacgcggtcctcctcgtccccgtccgccgccgcctgcgccgcggcggccgctgcatcgccccctgcctcaccgccctcctcctcgcgctcgcgggcttcctcctctggccggccgacccggacatctccctcgcccgcttccacctggggcacgtctccgtcgtggcgcgccccgccgtcgccgtcaccatatccgccgcgctcaaggtccgcgtccgcaacccggacctcttcgcgctcgactacacccgcctcgacgtcgccatcggctaccgcggcaagccgcttggcctggtaacgtccggcggcggacgggtccaggcgcgcgctgtctcgtacgtcgacgccaa

SEQ ID NO: 7897 - DNA, 758 bp, Zea mays
agacttgctgttggactagtagttctcatcaaatctccaccagcaatcaagagcagtatgtccagtcttctcacaaacctgacatatgatgtcagactttctggcatctgatgacaccattctctgggcactacgaccaggacctcctctgccacggccaggaccattacgaccacgaccacgaggttcatatctaggtccagatctaccacggccaagacgagcagcattgactgaggcttgtattcctccgtgaagcagttccatcctgttctcaaagctgagaagctgagaatggacatccccgactgagacaggttccacacgagcaacaatggctgagacaactggattgaattctgaatctaatcccgctagaatatacgagactagttcttcatcatcaataacctgcttggcagatctcatctcatctgcaagagatttcatcttggtgatatactcagaaacagtcatgttacctttccgagtagtagctagagcaattcgcgtgttgacagttcgtgcgcgagactgtgacacgtaggtttgctctaggagagaccacacatccttgggtgtggtacaggaggcaacctgacacatgacttctggagtcatggtcgtcatgaggaagcctaggacctgctgctcaagcgcggtccaccggataaattccagattgatctcttccgtggtcttgtcatcagacttgttgggaatcttctcctcaggcgcggcaagggaaccatcaaagt

SEQ ID NO: 7898 - DNA, 743 bp, Zea mays
cttgcatgcctgcagcagggggcagtggagatgaccgatgaggccatctcccgcttccctgtcagctctggaatgagatgcggcacgatctcgttgccctgttactccgcgccagctccatctccgtctccggcggcgctcgcgcagcacagacgctccacccgctggcgctcaagtccgggcgcgcctcggaggctcgcgtggcgaccgcgctggccgtggcgtacgcgcggtggggcctcgtcgcgcacgcacgccgcgtgttcgacgaagcgccgcgcagggacctggtcctctacaacgccatggtctcctgctatgcctcccacggcctcgcgcgcgaggcctgggcgctctttgccgccgcgcggcgctccgggatcgcccccgacgggttcaccttcagcgccctgctccgtccgccgccgcgccgtggccgccacccaaccgccggcgccgtcgatgacgggctgctgctcaggatgggagccctggcgcacagcctcgtgctcaggctgggtctcctcgcagacgtggtggttgccaccgcgctgctcgacatgtacgccaagtgcggccgggttgacgaggcgcgctgggtgttcgacgctatggcggtcaggaacgtcgtctcatggaacgcgatcgtagtctgctatggtcgggttggtggaggcaaggacgctgttgagctgttccggtggatgctgagagacgggagctgctgcccggatgagctcacg

SEQ ID NO: 7899 - DNA, 909 bp, Zea mays
acctcggttccttttgagtcgacctgcagcggcgcgatggctctggtgtgactgctccagtggcgctgcggcacaactgctctagcggcgcggcggcgccggcacaggagggagaagtggagaagcgagcagagggagagagcggagagagagaaagagactctggtggctgggagagggagtcggctgggaaatggagagagagagagagaagctggtggctgggaaatggagactcgcctcgccttacactttaccgcttaaaagttaaaagggggatctgtcgccttacctagccttaccgctttaataattatgctagtacctacagaatgcaaactaggtctgcccatgcaaatgggcatgggttgtgcttgtgcgagagggactctatcaaccatcatgtaatacaatgcagctagatagcacaacaacagcaatgattgtgatttgtgatagcatattcaattattcatcgcaagtgaacgagtagtgtgctcccctagtgaacgagtagtgtgctcccctagacgctgaagggttttggtatcagcatgtataattagcattgaaaacctaaaccgttcccagttcggagctctacatacatacgaaatgaaagtaggcacgacaagaaaatacattacagccttctaataacaaaaagtaattaatccatgtgaccatgtaccttcttctccccgaggaagtttctgatctcaatggcggagttggcgttggtgatggaggcgttgatgggaaagtgagcgtagacgaaccgcatcttatagcggaaacccttggtgacgcctgcgatgaggttctggacgtgggagatggcggtgcggatggcggccatggttcggcgggtgccaaaccaggcgtcgaccttgagcttgcgaccgccgt

SEQ ID NO: 7900 - DNA, 779 bp, Zea mays
agcgacttctactgcacaccacagcagtaccaacagtcatttctgcaatgatcaatctactgttgatggctgttcagatgcagagcattctgaaccacaaatcatcagcaggtaaatggccactcaaactcaagtgctgttttattttgcaagcctgagtgcaactgccttgaaagttttttcagctttagttaccttcttctgtagctcagaaatagactcggccataaggtggctctgcacatccaaaaaatggatcttgttgttagtacccaatcttacagcagcaaaccatttagagcagtaacacaagcattggctatagagcaaacagaagaagagattcctagttataaattgagcaaaactacagttactaccttccttgatctgatgtgcttcagtgagctctccagctgctgctctagttgctggagctctttgggattcaaagactctagatcctctcccatcaggtgcctgcaaggcacaaattttttttacttgatagtttgtttacaacaagtacagtaacaggatgattctagttccaaattattcaaaatccaaatcaccatcaaatgttattacttgtggcatttttgtatggtctcaattttggccttcagtttcctgtattcgtggcaccaatttccctgaataggaaaataaattctgtcagaactgctttaggaattaccagataatggatgatctggggacagtgagaaacaaacatatgtactagttaaggtctttttaactgaacataaatttgg

SEQ ID NO: 7901 - DNA, 782 bp, Zea mays
agctgctgagcgatctccctgagcagaacgacctgcgccttctcatctcccatggccatgatggcgtgccgcatggactcccgatccgcctccaacgcgtgcaacctggctttgagttcctgtatctcgtcctcctccgcccagcccgcggccccagcacgagcgcccacctcgccctcccacgtggtcccaaagtcgcagcagtcgtcgtcaggcgccatgaccggcacgccatgcaccgcgtcaaccgtgtacacccggtcggcctcctcctcgtcgtcctgccccggcgcgtccctgtccgtgaagagcgggaactcgtcggccagcgcgacccggcagctgtacgggccgccgtcgccggagaacgtgcggacgtggcgtgacgagcggcgcggcgagccaaacatgacgaccggcttatcggagtccggggggctgggagctccgtggggggcgcgcggggtgccctcgtcggcgaggtggtcgtcgaggcagtggacggaatggtaaccgtcgtcgccgtcggaggagcagaagggatggtcggcctcggccgcggccgcggtcggggtcggggaggacggggaagggaagccgaggtggagcaggcgcgcctggcaggaccggagcctggcggcgagcgagcggacggcggcgtcgcggcggccgagcgagtcgtgcagcgcggcggcctcggcggcgtcgtgcgcgaaccgctcctcggcgtagcgccggtactggcgcgcctccatcatggacctcagacttgctcgcgctgc

SEQ ID NO: 7902 - DNA, 855 bp, Zea mays
gacatcaatcatcggtgatctcatcctcgtcgtcgggagcccaggttggcagctgcaagaagatggaggaggtggaatctgctgcttctctctctctcatccctgccggcgccaactgtctgcgaagaaaccattggcagtgcgctcggatccgcccagaaagtctcaccaataacagctcttgcttaccaagggaacattgctcttgctggcgtgtcgtcgtagttctagactagatagactctccggtccgccccatataataaatgcatgtcttgtttataaaaaaatgatttacttcaattgtaagtttaactaaaactatatatatatatataatgataataatatatatttctaaataaatctattacaaaaaaatacattgcatgtttaggataatggtatttattatatatcataaacaataacatgtttttacatggatttggttgaattggacaaaggttaactccaggtgagaagcgggatatgcatgcgcctttattttaagaaagaaagaaaaaaaaacaggtgctgtgtcatcctgagtcatcaccttgaccgcgtgcttaaattcctccggtcagtgcactgaccgcggctccaccgcgcgcgcacacgggaccataaatatcatttttaacacaaccttggcgtacgtgacgggtcacgtacgttatttactgcggcaggccgccgtagaaaccagctggaatgagcacgcgcctgatgataattaatcagcgtgaacaaaaagacaatccatccaaccttattacaaacccctcacgtacgtacgtacacgacgcagcgcaagaccgcaacggaattcatcgcgacctgtcaagttca

SEQ ID NO: 7903 - DNA, 795 bp, Zea mays
atggaatgcctattgaagagatgaatgaagactatctctgtgccaaactacacttagtagatcttgctggatcagaacgggctaagagaactggttcagatggcctgcgcttcaaggaaggtatgcttgcttcttgtctgtccaaacccttagtctatgtatttatttctatgccaaattaaaggctattttatacttcgtgacattaggtgttcacatcaaccgaggacttctcgctctcggcaatgtcataagtgctcttggagatgagaaaaaaagaaaagaaggtgctcacgttccttatcgggacagcaagctcacccgtcttttgcaggtattatttttggtcacctataaatgcaaaaagaaaattgattttatggagcactttatagtagtgttcagaaatatagttatgctcaactcgtctttcaacagttaatattttccaatctaatagaaacctattgacatttttgtgtgaagcttgctcatgaaattcatattactaactagttgctactgatatttcatccgtagtatgttcaaggaattcatattactgactcttcctatatcatctgcttcatctattacaggattccctaggtggaaatagtaagactgtcatgataggtaatttatcttgtcggtgattgctccatgtttcttacattttacttggactatatttgctgatataagtgatatagaaaattaagtccagtaatatttgtttaactacaaaaagtgttgtttgagcttacactcacctgagttaaacatatctttttc

SEQ ID NO: 7904 - DNA, 906 bp, Zea mays
cgggatccctttatagtctacctgcagcagcaggaggaggtttcgtcagtcagtcatggtcacacatgtgtgtactgtttcggttgtgtgtgtgctctcaccgttctgatggaaccgatggtctgctccaccaccaccgacgattccgcgtaggccgcctggcccagggacgccatcttggtgacgacgttggacatgaccgcgcccgccaggacgagcggcgggatggtcgccatcatgaccagggtgagcagccagccctgcgcgaaggcgacgatgaagccgccgaagaaggtcaccagcagctggacgaacttgccgaccttctcgcccatggcgtcctggatgagcaccgtgtcgccggacatcctgcccacgacctcgccggtgctggtgtacttgtcgaagaaggcgatctcctgcctcaggatcgtcttgaggtacaggttccgtatccgcgccgcctgacgctcgccggtgatcatccagcaggtgacctctggtcggacggcgaacagttgagtgctcagtgctcagtgtctggccgcgttacgcaagaggtggaacttacggacgaaggaagcgacagcggaggccatggcgaggtagacgaagtcgagcgagaccatggacacccggctgacgacgtcgtggacgctgagcgcgccgccaaaggcgtcgatgaggttgccgaagagcacggtcatgaagggcaaggcggcgccgttggccacggccccgagcgcgcccagcagcatgagcgccacgtcggcggagtccgcgaacgcgaacagcctgtggaacggcacccgcgtcgccgcagcgccgggggactcccccgccccgcgccccttggcgccattgcccgggctccgagccgaggggccggacgccgtgcctgccgcc

SEQ ID NO: 7905 - DNA, 859 bp, Zea mays
gtatttttatatacatcataaggtctgcttcatgaaagagtatgaagtcaataatcaacaaatctagctagacttacaagttccttgagagcagtgacagaatctcctgttttcctggaattgttctcctccattttcataaagcgagattcctcagaagtacttgaaagtggcaacatatcatccctagtatttccagagtaaccaaagatgtttctgttgctaccgaaagcatcttgtttcatatcagtcaacttatttggatcagatgacaagtatttatctgcaagtaaatttactatgtcaaaaaacagactattgtacaaagtgttgcagcaatgcacaaatgaaacaaagctctacacctgaaccaaaaggttgtcagcaaagaaattaaagctcaagcaaatgggcaagcatgttactataactatcaaaaagcatgaggtggctattgctgaaacatgctcaggataaaatattacaagatgtttaatgatgctctaggagagaattaaataggaaacgtcagggcactgtatgctaccaaagcacaattatgagcaaacttttcttggttgccagaccacaaccaccatcaccggatcgccatgaaaaccgaagcctattagtcccaagcaagttgggttagcctttatgttcagaggcatccctcatggcctcacccgggggggggggggggggggatgtgataggtttggttagttaatctgactaacacagccactcatatagagataaaaaaataattggttcatatgaaattgatgacatatacaatgttatactataaggtgaagtagcacaaacttactggccaagtttcttaaagacattt

SEQ ID NO: 7906 - DNA, 822 bp, Zea mays
agtgtcccgtgtcctttgatctctactagtgaatacagtggctaggagtacatagtttccatgcatgcatgcatgtacttccgctactgcaagtctgcaagcaagttaataaatcaatgacagatcttgaccttgcgagcgagaagcacgcatatgcatgcgcaccattgtgtcgtcgtcggccgtcgcaccaccgcgcggtccatctctgcgcgcgcttcgatcgagcacgcacggcgagacgctggtagagaatgggacgccctgctgcctgcctgcctgcatctgcatcagaggtccgtgcgttgcagtaggggccgtgaacggcaactggcctggagttctctcggagaacgtgcatgcacgtaaccgtgttccagccattataatgcaggaaggaacggacgacgactatgcaatgcaaacaacatacgtacacaagctgtgtgctcgcgcggactcagtaagtcagtattactgcggttgcaatgcatgcatgcgcgcgctactagcacacaccatggcgccggcgggccatcgcgatgggtacgcacaggtacatgtacttgtcagtgtgtgagcgcacgcggtccctcgttcttttttactccttcagttttgtgtaccattccattggtaggttctgttgtttacctcttggctcttgcaaacgtacgtagggtataatggtatatgcagtttgttagctagaggcctctaaatcctaggatctatcgttttggcgtgagccgtcgtatagcccgacctcctagctactccagctagctagatagctagcgtttatagactttagttttagct

SEQ ID NO: 7907 - DNA, 852 bp, Zea mays
ctttgatggacctccttatccttagcttcctacagttacatacagaaggtgattttgagaaaacaaataagaaaactataatgctagtactcagctattcagtctataacctagaattccaaccttttctttgaacaatggcaccggctcccggttgcgcactgaccactcccatcctccttcccagcacaccttctcctttgcaccaggcccagctccggtgtgctagatgtctgagagccactaactagctggaacggcctgctggcccggcttccatccaagctcgcaagacttccttccatgctcagagacgaaaggaacgagcgagacgatgacgccgtgcaattggagctgtcaaacttgaggttcacacccttaccaccgcacccgccgccacttaagctaccaccctgctcaccaagattgctcctcttaaccatctcgctctgaatcttcatctgctgcatgagctgaaacctctggtagctctgctgctgctggatgaaatggaggtgtgcggcgggcaatgccggggtgggcatccctgcgggaggcgcaacggacaccggctgcaccatccggaccggaggggcaggcggcgacgacccctccagaccggcagccaggttctccagcagcaacctcttggggaactgcgcagggatcctgacaggatccttacacgacgagccctccatctggtggtacctcgggaacagctggaggccagtggtcgggctcggactgggcgtcttggccacagtcgcggcggcggccaccgcagagctgctctcgaggaagaggttgctgtagaagatgggcaggggcttcttggtcttcctgacccta

SEQ ID NO: 7908 - DNA, 845 bp, Zea mays
agtatggggacatgaaagttgctatgcaacttctgtctttcactgcctaaaatgcgaaaattcaattcaaacttggtattatcgacaatgccaaataatgtgaactacacacaagcaacgtcagcaaagaaccgatccccattccccactagagacaatcaaataagacgagttggcagcttttgttaagttttttcttcttcgacgaagaataagtgcggccagatggatggaaagcaaccaaaaaaaaacgagaggcagatgcagatcatgaacaaatcaacggttctatgataaaagctgtcgacaagctttctaattagtctcttgatctctcatgctccctccaaaccgcaaaaaaggcgcaaaacttttagaagaagacaaaatctgaggaaaaagatctcccgaaagcgggcaccatagagcagcacatgctcctccgcctttctctatgatttcacacgccgtgtcgttctttttaaaaacagcaccttttgattgtcgcagacccttccttcctgaggacaccaacccgctagaacgaacgcaacacacagggtttctccccccaaattccagcacagtactatgcgaaaacgcaaaattgagcgcttcgttcccttgccatgactgacggacagctcctctcgaattcaagagccatcgatcggccagaccagagcatgcgatatcgaaccggaccgcggcaaattttggaagaacaataataattgacccacaagaaaggtagtttaagcaaacaggtgagaggacgagacaagtgagggagggaccggttccatgggtgctcaccagaagctgcttcctgcaggcatgcaaga

SEQ ID NO: 7909 - DNA, 885 bp, Zea mays
tgcatgcctgcagtgcccaatgaaaaccatgtggctggaaacgacgaggaggaagtgcagagggctagggaaaggagtttcagaggcgatgatgtgtcaagctccgtggatcatgacgccaaggtggcaaagcctctcccagaggaacaactgaacagcatggataagatatttgaaggcaccacaaacttgtctaacggaatttcgtttcgagctcctggaaaaaatggatcatatgccggcatggacaatgtggctacagtaccaactaattcaccttcacagaaaaacgcaggcactcctagcaatgacatagaaagcaagacccacccatctccggcaaatttgaccggaccagagcaaagtaattcgactttgaaagatcacccagatcaacaagtgaattcaacagcagtgctgggcaaccaagtacagcctttgactaaccagacgccgtggcccgagttggattctccaaatggcaccttggctctggtaacagatgtccaaaagtccacatctggagctggagatgatggcagcagcactgtggacaagaggacggacggtagagatggtcccaaagaagacgtggatgtgtccacgaaaataatgaacagggcaatcagtgaggatgaagtcgttccagagtgacaaggagatctctcttgccggcttctggtgtaacctgtaagtttgtaggacttggtttcgtctcctagactagacttggagatgcgcaagcaggctgtctcgttgtgcacgccttttgtgtaagtttgatagatgtctgcttttgtactgccagttagtagtccatcacaatgatctgggtcgagtggagaacaagaagcatgtgtacccacagaaatatatgtagcgatt

SEQ ID NO: 7910 - DNA, 797 bp, Zea mays
ttcaccgacaggctctacagctacggcggcgcgcggacggacccgtcgttcaaccccgcctacgcgtaccagctcaagcaggcgtgccccatagacgtcggccccaccatcgccgtcaacatggaccccgtcagccccatcaggttcgacaacgcctactacgccaacctccaggacgggctggggctcttcacctccgaccaggtgctctacgccgacgaggcgaccaggcccatcgtcgacatgttcgccgccagccagaaggacttcttcgatgctttcgtcgccgccatgctcaagctggggaggctaggggtgaagacggggaaggacggagagatcagaagagtctgcactgccttcaaccattagtagaggcctctcctgcgtgcagcagcgtttgtaatccagattatctcaagctcatgctgtttggagttcgatcgagatgcgtatactgagattgatgattgatcatttttctttttcttctttttttgttgcatacacttgccaaagcttgaaggtgttctttctcctctgtttgtttcttccttttttttcttttcttctttaataacctttttaccttacttttttttgggtgcaatttttgtacagactgaagagtgtaataccatgaacaacttgaagatttttaattgaaaaaggttaatctgactatatgcacggccaatataataaagaaaaggttactttggctcgggctcggttttgtctaagtgcaatgctgccacatgatcttatttttaactttcttctgaaataatgatcat

SEQ ID NO: 7911 - DNA, 821 bp, Zea mays
tggtgccaagaaaggagaggaaaggagatgtgctggttggagactgtgttcgcggctaggttagaacaggagaggagaggataccctaaattatactgtagatgggctaaaaaaggcccaataactaaaccctagccgggacgaccaggttacataaatcggacgactagttgccctaatcgacgattagtcggacgaccaggacgactaggtattctagtcgagtcgtccagcaaatcgtaccctaattaccgaccagcccgactaatcacgattaatcgcgattagtcggacgacttgagtatagacttatttagtcatggaattttagaactcactgaagctctagttaacctttgttagtaacttagtatagttctgtatgacaacattggccattacaaatttagatttgacataacttgtagttgatgtgcatgtttcaagaatcaatgccagtgacatctcatatgataacccaaggaacttgaagactctgcgttaagtgatgtttgatgaaagagaatatttgttcgttattctctcttgagattctgatagaatttatatggtacagtacatgtcatttgtcactgatgaacattctgcttttatgtcgctgcgctttcgtcgtgcgggcgggtggggataaatgtgcgtttgtcgattttgtatttatgtgtttactccttgattactacatagaaggtagtttaacctaccagcttcttttttttttttaaaaaaaagtctgactaaaaaatgctaactttatcgccagatactcatccagtggggatccttttggtcaagactgggtt

SEQ ID NO: 7912 - DNA, 854 bp, Zea mays
aaagcaacccccacaagattcaccgagttaaaacgccatgccttgaaagcattaaagagtaataaaactattgaaaagtatatgtaggtcatcgcaaattcaataggatgttgtagtatagtatagctcgatcagttctatctgcatggcccaaactggatttcatgacaaatccagagcagcagatgagctccggacctaccaaaatatatatgcaacatcttcccaactctgtaaacttaatccgacgcagaactgctaaaccagcaagtgagcgctggtaaaaacaaacaaattgttcttttgtgaaaaaaataaaacaaagaaatcctgaaaggcagttggtaattaccggccacacgtgctggtacgagttgccatcgccgttccacatcagattggccaccttccggagcagactcacctcctcgggcgccaccgcggcgccgaccaccagcgacaggcgccggtcggcagcgacgacgacggccgccgcgaacacgacggccagcgcggccacggcgtggcagtagtacttcctccccattgcttgtcggctcggcaccaccaagatccaaaaaaaggtgagagaggcaaactgtgtgcagtgcagtccccaagatccaaaaaaaagacgaatccaaggaagattgggagctaggctttcggtacaggggcgcctctgaaatcacgggatcgaagggctgggtgggagacgtaacgcgcgaaggccgagcgcaacttttctgggatcccggccgggtggcgtgggctggccttgttggaagaatttggagtgcacggccgggacaggacgtgggaattaaaagctgcaggtcgactcaagaagatcc

SEQ ID NO: 7913 - DNA, 788 bp, Zea mays
agctagggtcttttctttgtaggtctctactcatgcacacattgctccaaaatgaatttaaaactgatgaatgaagctgttcgcaagggaaactgatgaatgaatttaaaaagtttgatctaaaggctagtttggatcggcgcgccggcggccacgccacgccacacctgtggcgctcaaaacgagcgccacactggtggcgtggaaagtgtggcgggcggcggcggcttaggcggccatccaaacatcccctaagtctcaaaacacgcatggtatttgggcaaaaatggcacagtgagcaaaagccttatccaagttccaagcggccccaaacctgagcgagcagttttcaggcaggaatgaccccggtctcacatgtcagtgagtcacaacagccagatggaaaggcccacgtcatctagtcattggttgtgaaatccccgttctacccctcccgtctctgatctcgataggggagccgggggagcgcgacgacggggagaaaaaacagaggaggaaaaaaacacccaaaaaaccaccttcttttcctgcgttcccctgctcgatccccgacgagaattcgctcccgaacccatcgatctgctctccgcagtccgccgatccgtggatcgatccgtgcgcgggctcggtccgccccgggttccgatctggtcgccgcctcgcctgaggagatgaacggcgccgggggcagccaccaccagcagcagcagaggctccggcagcagcagcagcaggcgctcctgatgcagcaggcgctgcagtcacgc

SEQ ID NO: 7914 - DNA, 810 bp, Zea mays
tcgctgctccatcttctagaagcttcgtagttcgacgagcatcccgaacattccttggcaaccggccaaacgcaagcacttttgcaacttgcatagccccgcgacaagaagtcaggcgccggataaaaaactatcgcctacgactaattgcgatgcccactgggagcttccacttccatagaccatagtgggttctggaatgtggaacgttctggaactttcacttgccaccggggctacccgggttcgggttcaagtggtagatgctctgcaccagcacatccacgtcgtcgtccacgtcgttgtccacgtcagctccgttcccctcctcgccatcgcatctgccctccctgtgcttctcctccaggccgaggttgagcaacttcgcccagaagctctccgtgtcctcgccgccgccgccgccgccccttctctcccaccgtctctcgtcgtcgtccgcctccgccacgccgttgacgccgaccggaagtccggaaatgtagtcgctcaccgccgactccgtggcagtgccgcttctctcgccgtcgcgcgggaggtactcgatggggcggcggcgctttctggagagcgcgtcctcgagctccctgcggcagccgccaaggccctcccggtcgaccagcatccggatgaagctcgggttcttcatggcacgcgcgaggaacaccgtcatctgctgctgcttctgctccgccgtggtgatgcgcttctccatggcctgcatctgcgcgcgcgtcgcctgctgctcctgccgcagcttcaccacctccgcgagcaggatccccctgtcgc

SEQ ID NO: 7915 - DNA, 855 bp, Zea mays
gcgcactcgtttgttccgctcgctcgcccgctcgcccgccaccgagagacgacactctacgtgtgtgcctgcgagagcgagagcgcaccagcagagcagacagcttcctctgcgcgcgcctgctggtcgcttcgcttcgcttcgctccagtccagggcaaaggacggcacatggcggggggcgggggcggccgggacctgccgtcgacgccgacgtgggcggtggccctggtgtgcgccgtcatcgtgctcgtctccgtcgccatggagcatggcctccacaagctcggccacgtacgtcgctcgctcgttgccatgcatggcgcatacgctgatgagcttatggtttctttgtgtgtctgcgtctgactgctgcctgtgtgtcgcctattcgttgcgtgcagtggttccatacgcggcagaagaaggccatgcgggaggccctggagaagatcaaagcaggtgagctgagaattcagttgttgcataaacaaagacctttatataagcaagctcaataatgctactagctagctagcagtattagcttccctctcctaaacaataacaaaacggtttggttggttgcgtgcgtgcgtacgtgcagagttgatgctgatgggcttcatctcgctgctcctcgccgtggggcagacgcccatctccaagatatgcatcccggccaaggctggcagcatcatgctgccgtgcaagccgccgaaaggcgccgccgccgccgccgacgacgacaagagcgacggccgccggagactcctctggtacccgccgtaccctggatacgatgagcccgggcaccaccgccgtttcctcgccggcgcggctccggacgacaact

SEQ ID NO: 7916 - DNA, 831 bp, Zea mays
ccggcgtgcgcagggaagcctcctcctccgtaagggtccagcaggaagaagtgacgaggcggtagtactactccggccgcggcgggaggatgatgggaggacggcggcggcggcggcgtcgaggaggcgccgtggtagtggacctggtggttgccgagggcagccagcatggcggcgctctcctcctcgaggctggccttgacggcggcgctggagaagccggcctcccgcatgacccggctcacgctggggtcgtcgaggatggagacgatgagctggtccagctcgaccttgatcgtgagcacaggctgctgctggtggtggtggctcggggaggtggtggagtgcggctgcggctggcctggcggcggcggcggcggcgacggctggctctggagctcgacgcagccgcggcgctggttggcctgcgcgcgcttgagcgcggccacgagggcgttggacagcgtcgggctggcgggctgctgctggaggagcgacgccgcgaaggaggtggcgggcgagggcgaggagcccaagccccccgcgttggccgtgcccgtgggcaggcggttgagcgcgacgttgaagcagagctccagcgcccggcactgctgcgccgggtgcgtctggcggcgcgacctggcgcaggcgcgcacgaggaggccgtaggccggcgctgacgcggcgatggtggtgaagagccggggcgacgacgacggcggcggtggcggcagctctgagccgccgagcagcgtgtaggcgacgtgcagcggcgtgacctgcgcgtggccgcggcggcgcgccaggcccagcgagagctgcaggcatgca

SEQ ID NO: 7917 - DNA, 775 bp, Zea mays
tcgcttgcagttccatagacatgaagctcacgaacaattgaacacctccctacaagttcagggcatgtaacattacggccacatttacgcaagcgcaacaggccgatcaggatatcctgtaaaattcatgaaaagtaaattgtgagtatattgctaagctcaagaagctacgacattatggttagctagacccattcattgagcaaaaggaatatcaagagaacccattggaagacagaataaaaagatctcaaactatggagaacaggtgtatactataatcacatcagaaataccgcctatacaggaagacactatattccagaattgtcatccctaagatcaaattggctagtcagcttaagtacctgtcgtgtatcctcataagagaggaacgtctcccagccctcatttgcagcatagtcacgtctaacaagctctacttcatcaggcctgatcttgtgatggatatcctacatacagatgcacagttagaataataaaaggacatccattttaggccgtgaaagtgattttactgtattttttatttacctgaatccctgcttcacgggttctgacatctcgacattttaggcccagatcatccattcgagccaaagctagctcacgaaggttacctttctcaacaccagaagtgacaagaggcataggaatatctctctggacccgatacactcgtgtccatggtggaaccatagacagaattcttgccacgatatccaccaagagctcaggtggataatttctatat

SEQ ID NO: 7918 - DNA, 787 bp, Zea mays
gctccagttcatcagcctctgcaatcacagcgatcttgactaatacgggtgtggctggccaaattgattcccccaggacttaaggtacctcgtagatctccagacgtcatccgcattgtgagtgtgtgattgtaggagaaagtgagaaacccaccacgatcatcctgtgtatagcacagtaaggatctcatcccagattcccagccacatgcagtaatagtttctaccacaattctgtgtcataactccaatacaaatttcacacggatcatattattggatatataccagcttttatagaatcgagatgtagcattccctgctaaacaaacaccttcactatacctgagcctgatatatgcaagttgggtattggaatcgatctgctatataagtttagaaaaggttttaaacataataaagttttgagtggcaatgccagcaaatcagaagcaccacatattccaacatgactgttaaagtgtacaaaaaagaagacaagaagttcagcatgaagaagctatcaagaaagtttgcagcattcatcaaagaagtcttatcaatgtggtcagtctctgataagtgataagcaagcaccttattagatgctaaagagcagaccagcatgctaagttgtctggataaacattatgattggtatgtctagttgaagatattataagcctgcttctttatctccacagcttcgaggagcttcttggccaccgcgcatgcgtacacagaagagcccttaggtatctgcaggtcgactatacaggatcggggg

SEQ ID NO: 7919 - DNA, 867 bp, Zea mays
agcgccgcatactcacgcttgcacttcaggttcagtcaccatattggcgttgacaatggacgacctgctctcgccctgctcgtccttttccccgccctcgccggcgtccttcttctcccacgccggccacccagtcatcgagttcgcctcctgtgaggtccccgagcaatggctactcgacgacctcgtcgtcgccaagaacgagggctatgacgacgtggacgacctatggcccgtgcggagctcgctctccccggactccgaggtctccgagcagccgcttcctccccagccgccgccaccgtcacagcaggagctgacgagcgtcacggcggccccggcgcagcagcagcagcgcctcgggaagcggcgtgggcggaaacccgggccccgcccggacggccccgccgtcagccacgtggagtccgagcggcagcggcgggagaagctgaaccggcggttctgcgacctccgcgccgccgtgcccaccgtgtcgcgcatggacaaggcgtccctgctcgcggacgccgcctcctacatcgcggagctccgcggccgcgtcgcgcggctcgaggccgactccaggcgtgccgccgcgtcgaggtgggaccctgccgtagcggcggcggcctccgccagcaccgccactatggggctggcgggagccggcggcggcgccgacgaggcggtggaggtgcggatgctggggccggacgcggccgcggtacgcgcgacgagcgcgggcccccacgcgcccgcgcggctgatgggcgcgctccggtctctggagctccacgtgcagcacgcctgcgtgacccgcgtgaacggcgtgaccgttcaggacgtcgtggtcgacgtggcgactcc

SEQ ID NO: 7920 - DNA, 871 bp, Zea mays
atcctttagattcgtcctgcagcgacgaaaataccatagaaaacacacccacagcctcatcagacacggagacacaccgttcggtcggtaggagagcatgctgcatgaatggagagagtagctagctagctagtatatcggtcgatcgacaggacatgccacaagtggtgcacagcctccgatccgtcacatgtccatggaggcatctgaatctgacaggggaaccggcgcgcgcacggcggtcggcagggcaagacttggctccgtgtgttcgtgttgttgccgccgaccacggtccccgcccgccaggctgctggctgcatgcattgcatgcaggccggagacacgcggggccgccggcgcagggatcgcacacagcgattaaaccacctcccagtcccactttgcagcagcagccagcaccagcaggcccgctctaggctctgatatgacatgcatgggaagatcgacgtgcatatgcgtccccggcggccactgcaatcaggcaggagcacgtagtacgagtgtacgacgttgcgttgctgcctgcccggctgtgcgcggtcagctttttcatacagcatgcatgcatgagatgatgagaacgtacgtacgtactccatgcatcgtccccatcgatcggtgcgcaaaccaaatgtacgtgggcccctatacggccggtgtcataagaaaagatctcgtggatgaagttaggaccacgccgcgtgcaccgccctcaaacggggcgatcccagagatcacgcgatctcaggtcccgtccctacacaggacgcatgcacgtccttctccctgtccggaccaactgccaaaagctagctactccgtcttcgtcgtcgccttcgcccaccat

SEQ ID NO: 7921 - DNA, 837 bp, Zea mays
tgccgcttgcagaggtattttgtcgaaaaaaacttctatttattatttatatctggacagcttctattggctgtaggataactggtgccatcgagtaaacctttacctgttcaaaagttcccaccttccattgataaaatcataattggtgccagctttttatcaagcatgagctcgcacctaagtgccagttttatttgccaccatttaactattctcctaactatatgaacagtgtgttgttatatttagtgtgttatgaggtcttgttagtttcatacttgcatgtcgtcttgtgtcaagataagttgagacagacaatgagatgcaaatatggctaggtgcaatatgttttgttcacaaataaacttgtttaaatgaggtgacatgccactcgcttcaattacccatgtgtggccaccattatgcattgcagtaacttaaaatctgttcaatgcagatgaacctgtacagcatgaagagaagcgactagccacttggggaaccgacgtgcctcaggatcttgttcttaatgagaagaagctggaggaatctctaaagaaggttagtgtcttgtttttgacctttggggcttgtttgggagcaagtggaatgaaggggattgagggggctagaatgaaaaaaataaccatttgccactatttggaggtgtgtggcaaaatttttgccctccattacccttggtgtcttcgttcataatttcccccccccccctactgaagctttggttttaatcccttacaggagactgcaaggagaaaagaggagaaggatgaaagaaagaggaagtataacgtgaagtggaacgacgaggtg

SEQ ID NO: 7922 - DNA, 766 bp, Zea mays
agacatgagaatcgtgttttgaggctggaacaggcaaattagaattgtagtatcattcacaagacgttaaataaaccactctcaaattcacaacaatcttatttatagtctaacctctcctccccacaagctgactccaccgagccatctcccggtggcatgtgcccaactatgatataaggaacgtagcacaataaatgtgttgccaattgattattagatagccatgaacaacaaattccccacacagtgaaaacttagacataatgcagttcccaagtgaatttagatgaacatgcctcagtaaagaatggctgaatttgaagtctgaactaaaccagctggccctaaatcaaactgagatccagcctgaagatctcatattgtaagtaaaccttcggacagacttttgctttgcaaactaccatggatgtatcagcaatacttaacagtcaggaaaaatgctgaaaggtttaccaaacttaggagtaaagaaatgaagtcgaaatgtatttctgtagtaatcaaacaatactgaggaactcgtatggcccagaatacagcccctttttatttcagaaaataagatgttgcaaatcttattttagtctaattcaatatttttccttgaaatcctctatataacctgataggtgcacattccccatttctgatatcagcctcagtttcattctgacaaatgcatcaaacatattactggtttcttagttagaaattctgtttcaggggcaagcatttacacctt

SEQ ID NO: 7923 - DNA, 742 bp, Zea mays
tgttgttgttagtgtaaatggcttctccaaggggacaatactgaatgaacatttggcagaccatcatggtatattctcatctgttatatgatttgcgttgcatttaaacattgcatcgatagttttcccgtgtgggttcacacgcatattccttgttgctgttaaatactttaattgtttatattcatataacattactgctctgctgaccatggtctgttttttcaccactaggtcaagctgctcagttgaagaatgtgttgaaacctgggcacgagttcaaccaactcttagttctcggtgaagtcaactaacttcatttgttatcaatgcactttgaaaaaaaaacagaacaaccctttttctgttaataaacatttgacgcattggacatttttacacagttatgttgtaaaaattatagcaaaaaatgaatctaaagtcactacgtcatgaccagtactttttttttgaactgatggaggatcaagcatacactgtctgaagtgttgtatatctagagggagtaccatactaccacgtaacagtttatgaaaggatgtgcagaatttcacaatggcaagtaggaagttcgctgttttgcatgcacacttgtagcgtgtcatggtctgtacattacctcacgatacaatcagttgtttgcactgattaatgatgatgcaccttttgttgttgtcagatggatatttgatcacattgctaatttttccaactattttct

SEQ ID NO: 7924 - DNA, 846 bp, Zea mays
agctcaggacgacgtcgtctggaccagcagcagcagatcaagaagcgcatcagcaagacgaccaaggcggccataccgaggagaagacgatgagcgcccctacaagtacaacacaagcagccaacaaccagctgtccacaagaacgtcgattgagagggtcttctgggcaagttttgaagaccttcccaacgccctcaagtcatgcttcctctacttggctgctttccccaagggcaccttcctgtctactggcagtatagtgcggttgtggatggccgaggggttcattaggccacagaagggcaagaccatcgaggagctgggccacgactatttcaaggagctggccttgagatgcctcgttcaggtttcagggatgaacgaggttggcggcatcaccaatgtcattgttcacggaaggctccatgggttcctgcactcggaggctcgtgaggccggcttcatcgacgtccatgacatgaacgacgtctttgtcccaccatcggtgcgccgcctctctttcatgagcttccaagacggatataccacattcactaacaggttctgtaagttgcgctccttcatatgctgggccaatgagaaagattcagacaatagtattggcagcagaggccgcgtgaacaatgaggaggaacgatggcatgatctcaacttcctgcatggttcagatttgcttcgtgtactctacatatcaggactaaggatcaaggagttgccgaatgaaattggcaacaagatccacttgcggtacttacgtgtaaacaccgagcacctcaaggagctcccggccagcatgcgaggctgcccaacctgcaggcatgcaa

SEQ ID NO: 7925 - DNA, 802 bp, Zea mays
gcgctgatgacggtgcggagcgcgcggctcggggacccgcggttggcgagcatgatctcgccgagctcggcggggctgaggcgggcgccggcctggaacccctcctccacctgcgggtacagcttgtggtccttgagccccaggtagctgctcgccagcgccttgaaggcctcgaagtcgcacatggtgaagtggatgtgcacgtcgagccgccccggccgcagcaccgccgggtccacgccgtccttgcctccgctcatggtgaacaccatcacgcgctcctcgccgcagcacgaggagaccccgtccatgaagccgagcacgcgcgccgtcctcgccgccgccgtctcgccgtccccgccgccgcgaaggtagcggtcgaggtcctccacgaggatgagcgaccgcggggtggtgtccagaagcagggcgcggaggtcgtcgccgacgccggcgcgggacaggtccatgtcgtagacgtcgtatcccaggaacctcgccatcgcagcggcgaacgtggacttgcccgtgccgggagcgccgtagagcaggtagctcctgcgccagacgcggccgaggcggtggtagtagccgcggcccttgaggaagctctccaggtcggcgcggacgcgcgccttgagctcggggtccatgaccaccgtgtcgagcgtggccgggtgggtgaagggcgcggacgtccaccgcggcgccggcgagggaccggctccgctagcgctggtgctggcgtagagccgcagctcgcggcggcgcgcctccatctcgtcggcgacggactcgaggt

SEQ ID NO: 7926 - DNA, 803 bp, Zea mays
acagacacaggtcaaaccctcttctctgtttccagccgtcacccttcaaaaccctacctatcccctaagtgtcgccccgccgacgccttacgccgcagcggacgcattgtgccgcggcggacgccttacgccatggcggaaggcgagctagacgtcttgccctgtgagcacgccttagcgctaaagcgacgctaaggcgacgcttaatggacgccttgataagcatggcaatgactaatatgcaagtagtcattaggtataagcgtgcaagcagctctcttggtccgttagatctacatccaaccgtatgtgtaattgtggtttgttaggagcttttttataaagctacacgaggtggtggtgggaggatttaaatgttaaatatggcatatggttagatctagacctaacggactaaaaaacctgcttgcacgattgcacctaatgactgcttacatattagtcgttgccgataagcatggtcacattcacggaaaatactaatcaaccgcaaaaaaagaagtttcaatctcattctatactcatatgatatatttttgcatgaggcacattgatactaatatccctgttttcaagtcgtcgactagtcgtccagtcggtcttgagaggccgacttgggggaccgactcgacttttctagcaagtcgctcgacttgcccacgactgaaatatctaagtcgactagggctagcaagtcggccgacttgtccccagttcggtccaaccagtccaaaggcccattacaaaacctaaaccctaacttacctgaagccgcccctcct

SEQ ID NO: 7927 - DNA, 837 bp, Zea mays
gaggctgatgtgaatgctaatcagagtacaaagaagccaccttctatgcgaatgttaaggcaagctgccaatgcatatacaccttctgcctttaaaatgtttgagagggaatttgaattgtacatggattgcatgctctacatctgtggtgagatgagcacaattttcgagtatagaataagtgttgaggacaagtcaagagatcacttcgttaaatttgattcactcaattccatgatgaattgtacttgtaagacgtttgaatttattggcatcccatgtcgccatatgctgaaggtacttgacatgaggaatatcaaggaccttcctgcccagtacatcatgaaaaggtggaggaaggatgccaaatcaggatcctcaaatggtggttgtgctttcttgtttgatggtgaccctgacttttctcacataaaacgttataattttttgtgtcgtatgttcagtgtagcagcggctagagctgcaacttctgatgaatcatttgcatatatggaaaaccagtcaaacatactgatggatcaaatagagcaagttattcaaaccaggccccctgacatagctgatcttattggtgctaattgtgatcgaacacaaaatccagttgacaatattgtcgctgaaggcattcaaagtcatactaattttcttagtggctccactgatggtatgtgttgaagtattggttttctttccatataaatacttgttgccacccaataaatgcattatgtgcattgcaggctctctaacatttccattcacattgggtgctggcacattggattaccgctgactggtacctactgttaggatggt

SEQ ID NO: 7928 - DNA, 843 bp, Zea mays
tctccctcgtgaagcttcgtgatggcctgcaccgggaaatacgccgcggcgtggtagtaaccgctcctgctgagagcctgcggcggcgtgttcctctgcccggacacgatctccaggaccaccatgccgaagctgtagacgtccaccttgggcgtgatggggaccccgctcagccactccggggcgaggtaccctgctgtccctctgaacgtggtcaggacccggctgaagtctcggccgacgaacgccgccatcccgaagtccgcgatcttgggcgcgaaggacgcgtcgaggaggatgttctccggtttgatgtcgcagtggatgatgcactcgcggcagctctggtgcaggtagcacagtcctcttgcgaccccgacggcgatcctgtacctcttgctccaatccagcgcagtggcgacgacggcggcactgctctgctggaacagatgcgcgtcgagggacccgttcaccacgtgctcgtacacaagcagcctcttgtcgccttcgcagcagaagccgatcagtctgaccaggttgatgtgctggatcatcccgaccgagctcacctcagcccggaactgcttctcgccttgccgggcatcgtcgagccttttcaccgccacagcggtcgagtcacccaacactcccttgaacacggagccgaaaccacctcccccgagcctgtcgctgaagttcttagtagcgcggcatagatcggtgtgtttgaacgccatgattccgccaccgtctccgacgccggcgtgtagcggcggcggcacattgttgcacctccagattacgagcgctagcacggcgagcactagtattccagaaccaaca

SEQ ID NO: 7929 - DNA, 827 bp, Zea mays
gaaacccctcatacaccagagggaggaaatggcagtgcagtatgctgccggttgcatcgccacagcattgggaacgccagagatgttagcagcaaggcacaatgttctccaaagagcgcctcaaaggctggatcagctactagatccagggtcaccaaatccagggaagacctgaaggcttccgtgaagaaagtgggactgccaagcgccgcgaacttcgctgtacaaacctaactcatcaggcattcactcccatatgccatttttcattttaatttatacctcacatcaccaaaaagatggcctcgtgttatttttgcattgtccttgtaagaacctggctaccagagacctgcgctgttcccgtcctgtaaatttgttgaaggttttgtaagggggtaaccgagtcagtcctgtgagaaccaagcgggtgggcagctgatgggatattggagtgacatattgtcgttgtgtggcggcattcgcgcgttctatgtattgtatctgagctgtaacttattgtggacattggcaaagcgattctgattgttgtcgcaaaatttgatcaggtcgtgtttcgaacttttaatcaggtatccttatgaattggaaactgggttgtgtttttttttcctgtccgaaacttgaaacagtaacatgataaaggatcagtacttgcagtgactttatagaaaagtaacagggggttcaccacttctgtaagtacatgattaaatggcgatactctactccgccaacatttcaattcggtgactaccagttaatccatcagaaatcaaccactttgatctctgcaggcatgcaag

SEQ ID NO: 7930 - DNA, 852 bp, Zea mays
tgccgccggcggaggcggtggcgagggtgaagacgtcggcgcaggacatcatcaacctcaagccactcatcgacaagaaggcgtggccgtacgtccagaacgacctccgcctccgggcctcctacctgcgctacgacctcaagaccgtcatcgcttccaagcccaaggaggagaagcagagcctcaaggagctcaccggcaagctcttcagcaccatcgacgatgtaagtcaaccccatccccatgcaattttcttcgccaagggtcactgtggaatctcctttttgcatggaaataacacacgtgagcttctcttctcgtttttggcagcttgaccatgccgcaaagatcaagagcaccccggaggccgagaaatacttcgcagcaaccaaagatgcgctcggcgacgtcctcgccaagctagcctagatggaagctaatagatgtgctaatgatggccatgtaatttcggacttgtgtttgttcatatggagccggcaaatgtaccgtttcctgttcatattatatcccaagttcttgacaagtacctttgcgggctgatggaacatcagaaacattttccagcagccttaactagtgatccacgtaatacatcggaaggcgtcaaattggaagttccgcgcctgagatagatgagtggaagcataatagaaatcgtgtcacagttctccgcaaaaacaaaataacaattgtacccagatcactcggccctacaaactacactcacgaattcatgtagctatttccaagcagcataggagtgaaacagaaatgggcttgaatgtcagacctctagctaatttagcattattatttcgacaattcagttaa

SEQ ID NO: 7931 - DNA, 894 bp, Zea mays
atcagcgtcggtatctgcccgttgttggcgaagtcgatcttgttcagcctcatgcagcacaggacatgctctggcaactcctcagccttctgtgcctgtaaccagtatcagaccatgggttaagctacagacactcggtcaaggggtcacttttcttttttttttcctttttttttctttttcttgaaacaaatcaagcggtcacttttcagccagcagcagaagaaaactgtgtgtacctggatagttagaccaagatcaagaacgccatgcttgagccgctcctggaaggtctcgagccctttccgcgatatgaagctgaaccgatggacatccagatcgatctcaaagtagtttgaaccctacattattatcaatgcaaaagacacgcattttttttatgtttgtcagagttggaaacacggttcactatttcagcacctgtttgtctataaataaactagcgaggaaattaatgcagtcttcggttaccttgtagaatttgtgttgtgggcgagatagcacaggcttcatattgtaggtctgcacaagcttcctctctgctgtgctcagttgcaggtcctcagggttcgccaaaccagccaggattttcagcctctcggtgtagggcacaatgctgtctactgggaaccccttcaccttttccgtttcctcgttcatgagcctctgcatcactggtccgtcagaaagttttcctaatgaggtgctttgtctgtgtactcagataaatctacctttatgctgtcctgcaactgaggagaaatctccttgtcaaaactgtcagataacttgaaatacagaactaggcttatcccatcgccgtcgttatcgccaaacactgtagcagggtaggtgggcaactgcaggcatgca

SEQ ID NO: 7932 - DNA, 847 bp, Zea mays
tacctccttcgggagggttttcccacctcaaatagccgtttctccgaaaacctaatttcccgcacgccacgtgttcggtaaaatgcccaaaccagccaaaaatgctccaattgaacccaaattttttaggcaccttcacaacacttccagcaacatccttgccaaatttcacgccaatccgagtttccaggcttcaatttcaccaaattccccgtttcgagcgatcgtttccgagctgagtgcccaaatctatttttcttcgcctaaattcaaaccaagcacacacttcactcatattcacctacataaacctattcgtgaagtttcggctcaattccatgtcgttttgtgcctcaattcgaattccaaatctcatatggcaatatttatcattcaaacgtcgttttcacgccgtttgacctttcgatcgtctcgtctcgtgttttctgtgccatatctctctgtgtatgtatttattcacatttcatatacttatgactatgtgactaatacgtgctcccctcttctgtcatttcagtgaccttgattgcccgtgtgacgtctcccgtcctgcctggatcgtcacctctcgtgtgagctttccaggtagtcatctcatcttttgctaatctatcggtcatttttgctctgtgcttagtcactctctctcatttgcagacatcagttcaggatgccacgcacgaagaatgtgtcggcgccagggggaggcgatgatgaggatcctcgtcgccccttcaggcaggtcaagggcaagactgtttacttggagcagcaagaaggccgcaagaagcggcgtacggacagagcagcccgtgcagcggcagta

SEQ ID NO: 7933 - DNA, 796 bp, Zea mays
cctcgatgtcctcgagcgcggcgacgacgtcgtccatggaagggcggctcttgcggtcgctgttgaggcacttgccggcgagcctggcgaccccgagagcgcggccttggtgtggtactggccgtccatccgctcgtccatgaggctcttgagcttgccggcgccggcggagagataaggccgcgcccactccaccaggctgtgctggtgggtcggccggttcaggtcgtgcgcgcgcagtcccgtcagcagctccagcagcaccacgctgaagccgtacacgtcgctcttgacgtacagttgccctgcatgcacggcgtcaacgtacgtacgtggggcggctgcgcctggtggccgcgccgtgcatcatcaccgccgtcacgctcgtgcgggtgcaggaacctacataccggtggcgacgtactccggcgccgcgtagccgtaggcgaccatgacccgggtcgtgacgtgcgacgtccccgcggagggcccgttcttggcgagcccgaagtccgacagcttcgcggtgaaatcctggcatgtctttggttagtggacatggtagctaaggagaagaccttcatatcgcatgcttgcttttgctgaagattaccgagtcgaggaggatgttggacgccttgaagtccctgtggatgacctgtttctccgacgagtgcaggaaggcgaggccgcgcgccgcgcccgtggcgatcttgagcctccggctccacgacagcgcctccaagtttccaccccctgcccggccagacagacattttgactcccagcaagtcag

SEQ ID NO: 7934 - DNA, 891 bp, Zea mays
tgcaacaacttgttgaatctacacatggcgttttgaatttctgtataagtagaacagcagaaggctccagtttcctggtagatcgacggaacagttcatggtaaaaaaaaagattttttttttccgacagagaatagagatgttcctaactctgcctaccctaccatcgtcctatacaacagcttacggaatcgaaaggaagggacctgggaatgcgattaggcaatgccgagactgacagtttcaagttacctctttttttttctccttccttcagtagatagacaatttggttggctggccttactccggtctgctccagggataagcagacgccagacaggggtggtgagcgagagcgagggcttcccttcctcatgcctgcttgtgtggtgctggctttgtcttatatatactatgctacgggggagtagaaatttggcttttttttgcttcaccaacaggagatactagcaaagatggatgcctcgattgcattgtttgatttaccttccacaaggatagaataattcaattcctctttttatggttttccggcctagtatgaatacgctacgcctctccattggatcctctggagtctggactcgtgagctgttgtctgtgtcggcctgctgccactgctggcttgctgcaccgtcgttgcagttgcagtcgcagacgcagctgtcgcggcctctgctgcttccagcacagtacagggcccagtgggctcctttctggcattaaagagaattaacccaagcaggcgccagaaaattgcccaaaggttcttccgtgtaacttaacttttttcattttataatgaaaaataaacgaaatttcaattctatatagcgacgagtacctgccggctctagacggagcagc

SEQ ID NO: 7935 - DNA, 901 bp, Zea mays
aagactagacttcacaaaaaatactgaacttaagctgcataagacaggtctcatagtagactatgcctactcccagccttgggctgtcggcggggctgcttggtcccaaccagtaggagcaaccactggatgtacagtaccgtccgcaggtacaggggccccggcttgatcccagccttcaccggtaggaactggagctgcaaacgaaattgggaatcgtcatgttaggacaacagtaactcggtacaaagtagaactgtcagtgttatagttttcttgtgaacacaacatgcatgggctcaagaagtctaataccaaagatgagaaaattttaaaagtaaggaggaggtaaccgtatatacccagagcagcaccccaatcagcaccagtaggagcaacaggtggtgcagccacatcagaggtccactgatcaccaccccactgatcagctccttggtaatcagtgattgcggcaaactcaggggccgcggcagcttcctcctcctgctcctttgcttcctctgggtctctgtagaagaacagatcgacctgcaaacaacattatcatataagaatgcaaaggttaccaaaaaaatctggactcatagcatctccaatgtcattttgaacagcgtcataagctagcataccatgacttcccacttgtgcccaggaaggatagtgcccctcatttgcagaaccatcctggacagaagccagaacagacatccaatgctgttcctccccttgttgttcgctgggatgccgatatcgacgtaccgcatgggagagtcagtgtcacaaaaggcaatggtcgggatgttccccagagcagactccttgattggctgcaaacgattaccagcataacaattagttcaccatcacactgcaggcatgc

SEQ ID NO: 7936 - DNA, 852 bp, Zea mays
tcccagcggcggcatgcagcacggtggatccacggatgtcgagatacgtcgacacgctggactcctcgagcagctccctgagcatctccacgctcccgcccctcgccgcggcgtggacggcccggctcatcatctcaagccggaacacggagctgcgcctggcgctggcttcgccgttccggcaactcgtcgagcacctcggcgacatggcgtggtcgagcagcagcctgaacacgtccgcgctcccgcccctggctgccgcgtagaacatgtccgtgacgccgtactcgccctcgccgaacacgagcagcgggtccctctccagcagctcccgcacgaacgcggcgtccccggccgccgccgccgcgtagagcacccagccgccgtacccggcccggagcagcgtgttctccccggcgccggggcggtggttcctgcactcgcactccagcagcaggctgcgggcgacggacgcgcggttccgggccgcgtcggcgaagcgggcgtcgtcgtcccacagcgcctcgaggcggcggatccggcggagggaggtgagcttgatgagcaggttagggtcgaggtgcagcagctggcggacgatgtcgtagtggccgtcggccgccgcccagtctatcggcgacgcgtaccaccactggtcgcccgtgctctcccaccgcagcgggaagtagcaggaccgctccatcgccggagcctcgggagagatccagcggcgggctgccgctgcgcctgcgctgctgtacctgtgcgcctcgcagtgagccgtggtcagctactcacatagtcacatggcatgtgatacaatcatattcatacaatacaaggccgtgccaa

SEQ ID NO: 7937 - DNA, 874 bp, Zea mays
tcccgcaccttgtgcacgtagggcaggaacacgtcgtggtagtccaggatgaacagccgcttcgccgccagcgcctgctccacggtcagcgcgccgttcatctgcttctccaggatctccttggtgatggcggactccgctggcccgtacacctccgggtccagcttgctcttgatggggaactcagtcagcagctggatgcacagcgggttgagccccgcgatcgtctgcctcgcgaactcctcgtccttgaaccacgagaaccggtcccctggcaaagcaaatcatttattttttttaagattaagataacaagcagtcctgagatgagtgtgtgtcttctagctagcttactctctatcatctccggcacctcgaagcggaggacgtggtcggtggtgtcctccaccagcttgaccatgcgcgggacgacggtgcggatggcgtcgaacccggtctgcggcggcagcgggatgccgtcgctgtagagttcgtcgatggcggggaagtgcgggaagcgcagatccttcttgttgatgagcagcgggcggagcgccggcagcagcgcgtgcaggccggagcgcagcgtggtggccccgaacgtgagctgcttcacctccgagaactgctcgtcgcggggcacgtagttgtggccctcgcgcatctccgtctcggggtccttcttggtcctggggcggccggtgcggcagcggcgcgggtatgggtactgcttgttgccgcccagcacgggccgctggtgggccgggttcttgtccgggtcgcccaggtcgttgtacacgtcgtagtcgtagacgcgctcgaacaccttgcgctcgccgtgcccgtcgccgcgcagcgcctgcaggcatgcaag

SEQ ID NO: 7938 - DNA, 818 bp, Zea mays
aaatggcaagtaatccagaagcgtgcatctgccagttaagtatgctcaaattttgactcgcaaaactgaagctatacaataacatttacatgcagaggtaggaaactaaacacagacaaaatttggaattagcgtccaggtcaaaattctagctgcacatttaagcaaactagtatatgcgaaccacaaagtgagaagaaccgccctcaacaatcttttacaaggccttctgtataatccaatcaatcccagcatgcactgactctccatagtcagcagcttattcatctctatctcttatttcaaactacactatgtaaacagcgtaattcgcaatgcaaaacagtgttttacatgatcatatgtacgatttgttagccatagcccaacaataccctactcgctctgctatgtacactcactttcagaatgaaccatatatatctagttctactttgctcaccctcactttctgatttgacagagaagtaaaggattccactcgctcacctgtccaatcatgatctgaccttagcaaccaagtttctggatcgatgaggttgaggaacgggaacgtgcttaaaaaggattttaacactacaaggatgagatgcgggacgagattgttcccacgtctccggaacggacgaacgtttccaaaatgaggagtatggacaagctctatgttcccggattttaaggatctgaccaacaaaattttgagccaccgatgtcttcttggtgcttccaacattatcatcatcttggaggaacatagtattagtggtgagctactccaagtggacaaaggaggatca

SEQ ID NO: 7939 - DNA, 805 bp, Zea mays
atttttaagagcatgttgtggaatttccatgccaaaatgatcagtaagaagatataacaacaaaagtctctgtactagagttttttttttttttgccaacaagtcatcacagttttcatatcatgttgcgtcacataaaccccaacatgttagttttacagcatccaaactgaatgtggaatcattaggggatagcaatagtctgaaaacattgtaccaaaagggcagcgagcatacagtaaatgtacagaactacagataaacagcatgagacaaagattggtccaggcttatcatgccattaatgtagcactagaaatcaaattaaaaaagccaagtagaactctccaagttttggaattcaaatgtgcctgagaaacagaaagataaatttgcaggaacggattatcagaccaagttacctgtaaacgcaagtaagcaaatactggagtctctaagagacggatcaatttatctaattgaaccaaaaaattcacatttatgtcttcttctcccagtgactgaataacacagcttgcgtgattgtatgcctacacacatatagaaagaacatccaaagatcagtcaatggaatactagtaggcaacacattcaaaacgaatcattacctgagcaagtaaacataaacttatcgtagccatcggagagtggcgccatgaagcatataaagactgaaacaagtccttgccacaagaatccactaacgacttcttaagaggagagcggagctcaccaagttcagttgatgtgagcaaaatcaaattcaaaacctgcaggcatgcaa

SEQ ID NO: 7940 - DNA, 817 bp, Zea mays
tcaaaatcttgatcaggtaatttggtctattaaatctggtaatggtacacaaatttacaaaaccctatataatgcctgtctcaattcattgcatcacatcaatcatcaatcctctagaaagtctataacattggtcatataaatacatctttatgtttccaaggttatctatcggataaaacttccaggccctgcaattctgggagaaggaaagcccgaaaaccaaaaccatgcaataattttcacccgtggtgaaggtttgcagaccatagatatgaaccaggtgtttctcatcatgccgttacttctcttttgtgaagaagatgactttcaatctcataaatttgttcttgccttatttattttgtaggacaactatttggaagaatcccttaaaatgagaaacctgctccaagagttccttacggagcatggagtgcggcgtccatctatacttggagttagagagcacatttttactggcaggttgattacttcaacacaattgagattgatggctttgttctttgcataatctcacacttattctcttcgaaaatgtagtgtatcctcccttgcatggttcatgtcaaatcaggagcacagttttgtgactattgggcagcgtctccttgcaaaccctctgaagtgagagcttctccttttttgactactctgtattccacaacaataaatgcacagtgaaattatattgcacataatggtatgaatatcacggtccatgaagcacagctctccaagtcctagtaggattagaatacgagtcacctatttcaaaattcattgtgtactcttt

SEQ ID NO: 7941 - DNA, 760 bp, Zea mays
agagaggcaaaatatcatcacctatagattccaacagcaagtttatgacagggaaaagagtcaacaggagaaagaatttcaaaatgcaaaggaaaatataatcatttctgtatgtgctctactatgcttctgttttgcaactttcagacaacgtagcagtaaattatttcagtaaattgactacaactaaggaaaaaaaatgcctccaggaaaggtattcaaattaacggagtaactgctcgagaagagttagagagacaagtatcataagaacactgggcatatgacagtataaaagtgatatgatatgagcttcagaaataattttttttttcgaaaaacgcaggagagctgcgcatcattatattaagaagaaggggaaattaaggtccaagaggaccagtacaaaaaaccaccctatggtggccagcaacaagcataaataaaactatccataggactaagatacaaaaagatgaccaaggaaaaaattaagtcgggcctgctgcgcctagagcagcagcaagcccaaggcttccgaggtgtttggcaccagccagcacccataaggatagctcgtcgacgaagcttcagaaataatgaccgagttattcacaggtacttacgaaaacgagagcatgtttcggactttgggtgcatcaggcatatccataaaaaaagagttggtaaaaaaagtaagacgccttctggcttctaggttgaaaggacatccatagcagattccttcaaccgaagtagc

SEQ ID NO: 7942 - DNA, 841 bp, Zea mays
tatgtaaaggattatgagtttgttgttatctttgatgctgattttcaaccccagccagacttcctgaagcgaactgtgccccatttcaaggtttggcggacatcttttgcttgcattttcatctaaggatgagtccatgtgaattcaattgtctgactcattgtgcgagaggtttctagggcaatgaggacgttgggttagttcaggcaaggtggtcttttgtgaacaaggatgagaacttgctaactaggctgcaaaacataaacctttgcttccactttgaggtggagcagcaggttaatgggatcttcctcaatttctttggattcaatggaacggcaggagtgtggagaataaaggcactcgaggattcaggtggatggatggagaggacaacagtggaggacatggatattgctgtccgagcacacctcaagggttggaagtttctgttccttaacgatgttgaggtacttacacatatataacattttactttatgattatattatattgtattgagacttgtgattacaaatgaagctgtgttgcatgattattctttcagtgccagtgtgagttgccggagtcatatgaggcatatcgaaagcagcaacaccgatggcattctggtcccatgcagttacttagactctgctttgtggatattatcaagtcgaaggtgtggacctttccttgctctctatgattatatgctcaacaataagttaacatgtttgcttttcggaaaattttgaacctttttttatgctggggctaaccgctaacctttcattcctttttttttttttgctgcaggtcgactttaaagggtaccccg

SEQ ID NO: 7943 - DNA, 809 bp, Zea mays
aaaaaaaagttttgacctgcatttacgcttgcagcacatcacccgagaaatggttttcatcgtagaggacatgatagtgtattggcctgctggttccctggagaaatgaatctacattcagagggacgaatataacacactcaagaagccaagtatctgctaaaacatacctgaattccagcatggctacaaaggtagaaatcaaactcccgcggatgacaaatctcggtatcaaccacagttcctgtgtattttaacaggaagaaaagagtcacaaattacagccaacatgcatgtatgtgttcaaaatagtatcatgcttgtgttagaagtggagatctcccaaagatatagtatggctaatgtggcggttgtcattaaaccaaccagggtccaatctcagtgacaagcaaatgctaatgctaaggttgtcattaaacaaggatgaacatcgcggtactaaccaggaagaatgttcccacttctgtcagtaacatctctccttccatgaactccagggaagagccttgtgtggtgccttttctgtattacgacaaatgtcactgggggtagatacccatcttccagagaggcacaagccttccttatcgcgtccatttcaaggagcaaaacatggttgaattgtccttcacttattccatccctaaataaacaaaacaaaagcaaaggaagtcacgaaatgaaggcttcatccaagagttatctagatagttaagtcaagcacatacctgtaaaatataatccttttgggctttttgccagtcctcttatagaacgaaatcagcaac

SEQ ID NO: 7944 - DNA, 872 bp, Zea mays
atccccagatcctctctagtcgacctgcagagctgggatccaaccctcgccaatccctgcacgtggtttcatgttacctgcaacctgaacaactccgtcgtccgtgtgtatgcatgacactctccattcttccatccaatgagatctgcatagctttctgaaagttccctatgggagcaagtatatatatagtcatccatgcatgcatctaccattaagtactgaaagatacttatctgaaataagccttgtttatgttacttcaagtcattgtttcttgcttttcttcagggatttgggaaaggcaggcatctccggccccctgcttccagatcttggagcacttgagagcctccagtacatgtatgcttgaaccatgcacataacctgttgcaagcagttactgatgaaagcatgcgtcacaggatgacagtttactcagcttgttcttgccatgcatgcgtgcatgtttgcagggagctgttcggcaacagcctgaacggttcgattccgtcaacgctgggcaacctgactgatctcatcagcttggatctctgggacaacctgcttaccggcccaatcccaactacgcttggttccatcagcacgctgcgatatctgtacgtaccccccgtttttttacaagatctccatgtgctccttcagaagactaccctgaattctgactatttttctgtctaattaaactgcacatgaatggatggaacaatggtgttctccaggaggttgtacgagaacaacctgacagggcctataccaccatcgtttggcaatctgactagccttctggaactgaagctccacaggaattcgttgagcggttcgattccggcctcccttggcaacatcaa

SEQ ID NO: 7945 - DNA, 817 bp, Zea mays
tttgcatgcctgcagacggagcggcaggagcttcccgttgatggggctgcgcgagcacatgatgacgtcgtgcagccccgtctcctccttgagcctctccagcagctcctccaggctagttccgttgaacgttaagtagtgcggctcctcgtccggcctcacctccccgtcgctgtccccgatgtggtagtggaccgctcgcccctccaccttgtgcagcggcacggagaaggaatccgtcgactgcatgcatgaagagagacgcagctgagcccgtcgagatggttgctcgagtgattggatatttggatcggtggatgtgagtagtgtatacgcacctcgagcctgtaaaatcccggagcgggtggtgcgatgtagcccggcggcggcggcgcgggctgccccttgaacggaaccaagttctcttcgcggtggtgcgcgggagggggcggcggcctcagcgccgacgttggtaacggagccgaagagtgcggcgctttgttgttatacgacgacgacggagccggagaggacgcgaaggcgtcggcgtcggtttccgcggcggcggaggacgatgagcaatcgggccccgttggcggcgggagcgcctggaagatctcgacgtcccagaccacccaccctgtgtgccggtgcgggacgtcgtgggtgacggagttccgccacggcgggagccccgcgttggcgcggaggaagttgccgtagcgcgtccggaggcgcacggcgcgggcgtgcgcgttgctgccggcgtcgtcgcgcacgggcacccactcgacggaggagtcgaggcggtggggca

SEQ ID NO: 7946 - DNA, 895 bp, Zea mays
ttgctgccgtagctaagagctctctgcattgatcaagggcgacgttttcctctcttgccgtagccgaaagtcccgaaaccaaacatgtcctgtcttcgacctggcacgcacgcatgtcctagcgtcaataacggcagcaaggacgtcctcccatcttccaccaaaccatgtagtactaataatataaacagttcatagattatagttgtttccttttaaacatatataattagtttacaatgattctgaggctcgttccaaatcatcatagtagagacatactgtggaagaaccgaaagctaaaaaaaaacccaaccttcgattgcacgtagtagatagaggaactcagagcttgcatgacatcaacggctgagcttatagcgttcctgactgcaattccgtcagcctgctcacgcagtagcaatgccattattatatatatcctagtagaaacaataaagaccactgttcattagttggaagatgtttgtttggcacacacctgtgctcctgatgtgactggaaggcgaagcgtgcttgctttgagagcctccgtcgcctcaactagtgtgccattgcattcttcttctagtgcaggccattgctcaaggtaacaaatctgaatcatactagtgtatgcatggtcagtaaaccgaattatgggagaaaacaaggctgcccataaggtttccacacatatatatctattcaatatggttggttctttccattatctaaaaaacatatatttattaatatggttttttttcaaaaaaaaaatgtctatgcatgggtcctccgatcctaaacaggtcgagatgcaaaaacaaagtgactggtttctgaatattgcactgcacctgctctgttagaatgtgatacagcttcacttgtt

SEQ ID NO: 7947 - DNA, 863 bp, Zea mays
tacactcgacctgcaggccgcgacgcacgcacgcaccaccgcgtcagcgaaccaggggccgagaagagagaccacaacaacgcgcgcgcgcgcgtatatacgtaggataggaagaagtacatgaaaggacagcaggagaccacttctcaccatcggcgaggagacgcacgcagagcgggagctcgcgcctgaacacctcgatcttccggcgctcctcctcgaggctcctgatgcaggactcgatctccgccggcgcacccttggccgcggccgccatccctccggcgctccgcgcggcgaacagcccgaggtccagacccagatccaggcccatcccgatgccgccgacgtccagccccatgcacgcgacgcgagcgatgcgtgaagcaaggtacgggcaccaccaccaggaatcttttgcgcagagaagaatcggcgaccggaagccgagacgaacaaacgaaagagagagagagaggcggaggcggtgggtggggtgggtggaggatgactgtgaggggatctggattccggaggtgcgcccgccctggcatatgtatagacgggtggtggcggcgagcggggcgaatggaatctgcgagctggaccgcaggatgggaggagagagagagacagagagaccacgcccccaaaccacgcggcgcctggggtgcggtgggcgcgcgctgcgttgccgattcctcacgtcgcatccagcgcgataagctcgcggtcgcggccggagccggacgtctctgtctctctcaacactccacggtgaatcgtggatccctccatcggcgcggcgcggcctcgagttaccgcttctcacacgcgtagttttgcgcctgcacccctcgcgt

SEQ ID NO: 7948 - DNA, 849 bp, Zea mays
aggttctgcctcttgcttctctatagagcttgtggctggcacaccagcatcactaagacgagcatcaccaccaatttgtattgaatcaggcccagtgcttgaagattgtgcttggctagatggaagtgtcttcttctcatctacaatggtactatgcacttcaggagtagatccttcacctccggcacgagaggcttcttcttgactagcaataagtgggctccccaaatttctggtctgactatcgtcaggagaggattcctgatcccttgatacactgtcactagcatctggtgtcgagattgtgacctgacgagtaacatctgtcggtggtacagtcgtttggtcagcagtggcagcatctgtatcttcttcccttggttcagcagagtcaaatgattttgaggccttatcagatttttcatctgaaatgaaagaaacaacctcagatgtggcagagtagttctgttttagtatccattttttctactaaactggaaacaaagatgcacctttagttaaccaacagtaaacatactaaaacattacctgatgcagcaaaattttgttgggtatctgacgttggaaaaactcttgcgccttgtggagatgtcagttcttcttgaccaaggattgcttgtgatgcgtgtgaaacatgtccttgatttagatcaaatggttttcctgagtcatcagtgccatgtttatccggagttaccacctggattttccctataacactctgggtatctgaggctggaattcctattgtggttggtgcagatgatctggcctgttgctgaaaactcatttgcagctcattagtataattagctgcaggcatgcaag

SEQ ID NO: 7949 - DNA, 840 bp, Zea mays
cttgcatgcctgcagtttagaaatagacagaaccagtcacatccttaccttggcaactaaagatatgatccctccgcatagagaccaagcaaagtaagttaagcttcatacacaacttaaccataaaccacaagcttaggttagtggtaaaaagataaacaaagcgacttgtgcatggtcttcaccagtaagatgcattagagggtgtttgaactttgaatgcactagctagggcgtttggatctctccggctaattttagctactaactattagctctagtgcattcaaacacctccttagtctaccaaatcgaccaatcacggagcataaagtcaaccagagctccaatctcgccaccatcgacccacccaccaatccactaaaacccacagatacgccacgttgcgatcaacagctcaacgcaacgatcgctccgaggtagcgtgacgtaccatcgtcttcctgggtcgcggcggatgcggccggcggcgactcattcgactccccggccgcgccgcccccgccgccggtggcagccgcgatgtgcgacagcctggacgcggcagagctcatggcgctccggcggggcaggtggagatgccgccgcggctgaggaagaggaaggggaaggcgtagagtggtggcgcgagcacgcagtggtgagaacggcagcagacctaggcggaggcaggatctgtgcaggatggagatggaggacatgatttttttttcggggtcgcgcttccgtcttgtatatacagatagcgtaggggattagcttttagacttgctgatgctgctttgcgttcaggcagtgaagagaggcaggaagatattt

SEQ ID NO: 7950 - DNA, 840 bp, Zea mays
aacagaacttagaagatcctggttacctaggaaggttttcgacaattgcaccgtagtcacctccagttacatgaaaaccttcttagactaaattattgtacaacaaaacgtcagattagcctttctagctatgctgccgacgcgttaagtaccactggtgaggatatgatagagtgtggcggcctcccgaagccgccgcaggttggtcgccttcacggctccggtgcgcccattccttgcaggacaagaggagcccgtttcagcagacccgacatcggtggcaagggcgtaatcttgcgaattgatgtattgcattacctcttatcaagctctaccttcttttccaggtcatgcaccagattgcgcagccttttgatgaggtgactcagcgcttggacggtttcacggccttccttggattcacataggctttttagaatatcagacgcgatgaagaatccgtctgctttgttcctaagcacatccatcccatataagaatggcatgcccccaaaacacagcttataacaaggacaagcatataatgttcacaaaccaacaaactcaaacccgtcgccattcttaatctagtatactcaagatcaaaatgattgggatatgtacgcatcaaactaagaagaacagactaccttataaataaagagttttagagggcggcaccaactacagctaagctagaacatcaaacagatcatcacaatgtcatgaatgtgacagcaagaaactaaccaggcaacataaacgcagcatgtgaacttgaacatatgcatactatatatagatacctcagtaattcctggaagatgatttcaacagatt

SEQ ID NO: 7951 - DNA, 820 bp, Zea mays
aacagctagcgcggcgtcgtggtagtcccgcacgcttgttaagtgctaacggaatcgatgcttcgtagtactactctattagtcttccaaaaattcggtgcaggattaattcacatgaacagaaacacacggaattgctttcagatcaaaatccgccgcggagtatatataacaaaatacaacggcaaaaaaatatttcttcgttacgtacgtcgcgcgaaacatttgttctccttttcatcgccattattggccagttgacaagtctagctggtacgaacagaaaatggcatagtgtttgttttgctgggtggcaataaggttgtgaaagaaatgcatggcacaaaacatacggaatatattcgcccaaaaaacttaaactttctgtgtgtaacaacgatatttgcttcggattaaaattcggccgtttagactgctgcaacagctatattatttctttcgtgcccacaattgtttctgtcggtttctttatcaacgtctagccttttaatttcctgtgcggccctaggtagctagcccaggaacaggtgaccgatcaaacccacgcacgcaccgccgaccaaagctatatattcgctagggaaaatatatgtgctggtaaacgatcgccgccgcttcgctagctagtgcatcacagaatcaaaggcacgggagtattcttgtcctcctccacggctcgataagaacttgtgtgccatcctgcctaaattctgaaaccgatcgagatcttcgtactaaaacctgcgacgtcgacgccgcgggcggatctttgggcaaagcagattattccacaaggata

SEQ ID NO: 7952 - DNA, 897 bp, Zea mays
acctcggatccttttagtcgacctgcagctcgcaacaacgatattgctaagcaagataagatttcaactttttttcccctggatcgatctcagattaggaggagcaaataaagcaagaatagaaagatttttgggggagaaggcatgatgctggaagggaagtcctaccttgtgtcacgctccgtgccgagctcctgcgagccggaggcggagtgggagtacctcgcccacgcggtcctcagcggcaagcgcccggcgccggaagatgacgtcgaggtcgaagacccggacgaaactggcagcggcggcaagcgcagcaagccgccatctccgcagccgcacacgccggacatctgcgagggccacggctccaaccgccacgcaaccggttccggagagcagcggatcaccgggagcaaccccatgacttcgatcggtcgtgacctgaccctcaattgcctcctccggctatctcggtccgactacggctcggtggcctccctcagccgggacttccgctccatggtccgcagcggggagatctaccggctgcggcgccagaacggggtggccgagcattgggtctacttctcctgcaacgttctcgaatgggatgcctacgacccataccgggagcggtggatccaagtgcccaagatgccgcctgatgaatgcttcaagtgctccgacaaggaatcgcttgcggtgggcactgagctgcttgtgttcgggatggcgcgtatcgtcttccgatacagcatcctgaccaactcatggagcagggctgatccgatgaactctccgcggtgcctgttcgggtcaacgagtgtcggcgggaaggccttcgtcgccggaggcactgattgtgtcggcaacatactagcgcgcagcgaacat

SEQ ID NO: 7953 - DNA, 874 bp, Zea mays
gttgttgttaccagccaaacacactgattcactaaaccttgtgccaatgtgtggcctgaacacactgatgtaccatcctaacttgaagccagcccaaaaacaagctgcccaagccccagtgaagcagctacaacaatggcagatatagtgagagatcagaaatgggaaaagacgaccgagagatgtcgatcaagcttatgtaacatgacctctggtgtgttagagccccaattaaagtcgatggtcagcaaaacacacatgaactcgcgacgacgacggcgagaaaagacgaagaacaccaccaggacccagtactaggaaagagatcaaacactcccatgtcagggcaaccaccaccaatgccaacctcttattgaacccttgtctctactgcatgcccatgcacgctcgcaggcagggagcctttgcatgagccatgcatgcatggcgccgccccccggccgtgcatgtttctccattaccaagaagcgccactgccgccgatcatgccgctccagaaccccggcgtgtcgtgcccggcacccgtgccgccgccgccttgctccttgttgttgtggtcaaactgagtatggctgctatttccatcgctggcgccaccggttgcaccacccccaccttcagagccaaccggcggcttcaagtcttcgaaggggaacaataacctgcccgcgttctccggcacgccctgcaaccccgcgctggaaccgtaccccgccgcggtagcaccggaccccggcccgtgcgcgtcgagagagaacccgagcacgctctgtgacggtggaggcggcggcgtgcggtactctccgagcgcgaaccctgccgccgtgtaatctcctggcatcgccatcggcat

SEQ ID NO: 7954 - DNA, 817 bp, Zea mays
tggttaaatgtccaggtagggataacaataactaactttgaactacacatttggtgattttcctctcacctgaacatttgttttcttttcaaattgcagcaagacagtttctacagccagtttaagcttagcatgcgaaactatatcctgtctttatcgaaacaattcattactgattacatctcatcgcctgaagtgaacttcctcaccagtatatctggaagagttagcaagaagacaaagcttgtgttccgctttcttgacgaaggctctattgagccatcgacaaaccagacatatgggtccatgttgaaaaatctaacatttgtcaagacttttgcctctggaatacttgttcccaaaagctatatctggcctgttacaccagataattacctactgccttatacttcagttgttgatgatgctcacaaagcggggctagaaatctatgctgctgattttgcaaatgactttactatcagctataactacagctttgatccattagcggaatatctttccttcattggtaacagtgccttctctgtcgatggtgtgttgactgatttcccgattactccttcagaagcagttggtgagtccacctatccttttttttttcatgatgctatgcataagtatctgttcaagaattctatgcactcaagatgccagtgggtcagtgtgaacttttatttagaatagttgttaacttatggaatcatggttcagttatttttatcttttggcacaagttttctaacaagttggaagatgtagcatggatcacggcccttgatttgttcttcttttt

SEQ ID NO: 7955 - DNA, 805 bp, Zea mays
gttctttggttagaagccattctcggatcacctggctttctgtggatgacggcaatacaagcttcttctatttacacgctaaatatagaaaaaacaagaattctatcaatagcctgatttctgatgatggtctgatcctgaccaagcatgaggacatggagagaggtaatcgagttttatcataatctgctgggggtttcctctgaccgagaacataccattaatctggaagaactttgcatcccctctcatgatctctctgagctggaaagtcccttctctgaggaggaagtttggaaagctatattatccttaccatcaaacaaggctcatgggcctgatgggttcactgggaaattctataaatcatgttggcagatcaaaaaaggggatatcttggttgcaacctcggcggtttggagcagaagattgaggaactttgagctactcaagtcagcctacatcaccctgctccccaaaaaggaagatgccacacatgtcaaggactttcggcccataagtctggtccattcatttgcaaagctcatcactaaacttattgccaacagactctctggacacctagataagatggtgtctcataatcaaagtgcttttatcaaaggtcggacgattttagacaacttcatgcttgtccaacaaacaccaagttgctgcatcatcataaacttgcaaggattatattgaaattagatatcacaaaagccttcgactcagtctcttggccttttttattggaggttatgcaacatttgggctttgggctggtttggtgtgatatagt

SEQ ID NO: 7956 - DNA, 775 bp, Zea mays
gatcctctacagtcgacctgtttcactatttttttgaaaaggaaataacttattccagcctctgcatgtcagtatgcaacgtgagactgttatccatactactcagctctaaaatgatttaacgaagcataacttggattgcacttagatattattatcatgaattaagttatcttttaattgtttttataaattatatgattttattaataaaggtcgtgcacttagcgctagtatgggctaatgatagttggtaatagtatgtgacggtcgatatagatacgtagcactgaaaccagcctaacacatcatgacaaatttagatattattattatatttatgatagacaaattacactccctccatcatctaatatatgtactcgaatataagatattagtctggttccagtgcatccaattcttatcgaccaccacgtcagatatcaaccacactacgtcactaccggccatactatcaactatcgttagctctgatctatcgtagtgctctagtttagagcctttacatcgtcctacagccacttcagtatcataccaacttttcttttactaacttttatttaaaataaaacatggcattttactaaaatgaaaatgtatccgaaccacggaaaactttctcggcgagaaattttcgagaaaatcgaaaatctcatttctcgctagggcccgattattacccttaccgctcaaatttttcggctgttttaaattcagccggcccaatccagttcgtatgtattttggctgt

SEQ ID NO: 7957 - DNA, 829 bp, Zea mays
tgcgaagaacaagaaactgacctggtggcgtgccgcagcacatgtccctgtcgtcgatgtgctccacgtctaggccgatgaaccacgcgccgagcgacacgtcttcgttcgcgtatttatgcagtatgggcctgggcggtgggtggtatatggtgaacgcatatgcatcagctgcctgccagtgccactgaagagagagagaaaaaaaaaagaaggttttgtcttactggttgatggagatgtaggtcgcgaggtccttggatatggcgtatatctgccccgtggcgtggcggaagtacttgttcccgtcctctccgaacttccagaactcaggctcatggtatttcgcattcctgaaaagaaggaaaaagaaaacatgtatgtgaaaacgaaacgctggtatttcgacgattcaattcgaatgctacgctgcttttttttttacagaagaatttatatacttgtcggagaggaccggtcccgacttcatgcagccaatgtacacccgtggcttcagtttgtgccggccgagggtggcgacgagcatccctgcacagtctacgccatgaagatttctggacagctggtttctgtcttctctaaacgaactctgaactcttggaggtgcgttttgttaccggatcggagcaagggagcacgtagtttacctaggttcaggtgaacatcgtcgtccaccttgacatagaaatccgcgtcccataaggccacggcagttgagaagaatgtcttggtcttcgcagacagcttgtggtacccttcgacatggtcctgcaaagcatatgcacagttcagctgcaggcatgcaagc

SEQ ID NO: 7958 - DNA, 895 bp, Zea mays
agtcttgcatgcctgcaggcttttggccagatggtcaaggagccagttagactggatgatgtcacattgctgaacgcactcgttgcttctgccaaggcaggcaaagcgaaggtcgggaggctgtgtcacagtttagttgtggtgaacggggctggaattaattgttatatgggatcctctctgattagtatgtatgccaagtgtggattggttgaggatgcccgcaaggtatttcacggaatgcatgagagaaacgtcgtttgctggacatcaatgatttctgggtacacacagttgggtaagtttaaaaaggctgtcgatcttttcagggatatgcaaattactggaatgaaggctgatgatgggacgattgctactgttgtgtcttcatgtgcccaaatgggagcacttgacttgggacgatatgttcatgcttactgtgatgttcatggtttagggaaggagctttctgttaagaattcactgattgatatgtactcgaaatgtggggatataactaaggctcatgagatattctgtggattgaccaagagagatgtgttttcttggacggcaatgataatgggctttactgttaatggcttatgtaatgaagcacttgatttgtttgctcagatggaaggagagggtaaggttatgccaaatgaggtcacttttttgggtgtccttacttcttgtagccatggagggttagtggaacaagggttccatcacttccagcgtatgtccatggtctacaatcttgcaccgaggattgaacactatggatgcatggttgatctcttgggacgtgcaaagctattgacagaggcagaacaatttattaacgggatgcctattgccccagatgttgtagtatggcggtctttattgt

SEQ ID NO: 7959 - DNA, 827 bp, Zea mays
acttgattcagaagagcctatcaacaaaccaaaaaagaaataaagaaaaggttcgacggagaagatataatcatgataagagcgtgcacatttagacttttataacagttcccagttcgatacgattttcttgaacaagtaaactaataaacaagagcagaacaagcatctcgatgagtgaaactaatagctgctaaaaaacttaaaaaggaaatagattttgatcacacgacattgcaataaggacagccaaggtgcaaaattctggtacggaaagtgtcataagcaaaattcgcgttaaaattagagctttaaaccattccatttattgcagcattacgacacagagcactagagcagagtagcaccaaactcaaaacgtacaataaacagtaactagacacctatcgatttagatcaatacaactgtcttcagggaagcagaaattagacgaatatgcaaatacaatagttacagctaaagcataatgtcaaatacggcagtggggacgaaccagagattaacatcataatctcgaaaaggaagaattctaccattgaaaaagaagtctttcagcaataaaattgcttgctccacattagagatcctggcaacagcaagtgagaattcaaccagcagacgagtgcttcggttgactacaatggcagtgtgattgaatgcatatctcagttaattcatgtgatctatgatgataaccatcatgttcatcattggcattcataatttcttcttgttcttgctacccttggggcgaccacgcttcttcgcacccaccttcactcgcatcggcttcgctggcggtgtc

SEQ ID NO: 7960 - DNA, 608 bp, Zea mays
cggctcggtcccgtgatcttatgtcgactgcagtccaaataccatgccggacaaaaatgaacacgcttttgtctcgactagattttgcccttttcttcttcttctttgtactctttcactagactaacctcatggaacacaagcttggtcttctcacgtcggtcatcatcgtggggcatgaagaacatccctacggcgtactcaccttgcggtggaagctcaaagccggcgtccttggtgacctgacacgacacaaaaccaagcacaaagtgacccctcggccacagaaagtccttctccctcgttaacaacttcaactaaacataagcttgcctctctgagaaaggcatccggcagtgcaacaaggatgcccgcaccatcgccggtgttcttgtcacagccacaggcgccacggtgggacattctctcaagcatctcgacggcgtcgacgatctacagttcagacacaggccacgttaagcgaactctgacatgtacaggggctggcacaaagcactgagttactgaaagcttcagcaaggaagaataaggaatggaagtatgaactccaagcaggcgcgcgcgtagtcgcggaagcgctcacggtt

SEQ ID NO: 7961 - DNA, 804 bp, Zea mays
accacagaaagagggggaggcacagtgtgaacccaagccgatgcatacagaggtgggatatggggagagcaatgccacttcccagttcgattccagagctactgctgagggatacggggatcggagcgctgatgcgcaggtggagtacactgatcccagatatctagagagcctctaccctggctggaagtacgacgaggccacacatcagtggtatcaggtagataccctcaacacacagacttatgctgctcgtgatactggtggtgctgtggcagaccttgcgagtggcggtagtgttcagcagcaccaacagtttagtggttcgtacatacaaaacacttcacatccagagcctgctcttgagcttacagagccgacttctgagtcaaagcctcagcttgagcctgcggcggcccctcctcagaccgatgcttatcctgcggtggcatcacataaagaggagcagaaagagcatggatctgtaccggtgcatactaagcctgaagctcaggagattcctgccaatgctggtgatactgccacagtgacagagggtgggtccccagggtcagagaaaggcatccataccgccgtcaagcaagtgcagtggaacgactttggtgccagcactggtggggcggatctatttggtgacctcctgcccgatggagctgaagatgacttctttgagggcaccgtccctgtcagccaagacgtctcatccttggtaggtgctacaaatgttagcgcaccagatcacagcttctctgcaggtcgaaatacaggatcgcgggttgccca

SEQ ID NO: 7962 - DNA, 858 bp, Zea mays
agtgctgatgacaccagcgtagtctgcgggaagggattgtgcacgaggcaggcgacgcttctgccggtctagatgcagctgatctaagccgaaaccagtgggaggactaaggagggtacgtatctggctttctgctgcataccgcggcgttgtttttgcgcgcgctgctgctttctctgcgctgtttccattccagtcccgagtcccattctccaaccccaaaccccaatggcccaatcccaacgcggatagcgagcgtcatgggtgtgcagtgtgctcgtaaagtcgttggggcctgatcttgagtacggctaggtatagatataaatggtactgatattatttgtctgtatttgaatttgaaccgtctaagagggctaaaacccgatctatatttcgagttcgagtattagtagccgatccgtatcagaattatatctgtacactcaaagttagatatttaagatttcgatattaattctaattttatccgacacaactcgacaatatctgtatccgatctgaattcgaagagaaaatatgaaaacaaatatgttacaagtactatccgtccgtatccattacactcctacggctacgggtgtcaatgagttctaaattatgaagaagcatttagatcgtggtttattacctcctctaagtacggctcaaccactattggcgtggccgtaagtgttagaccctgttcgatggttcgtgtaaaatagagtatgtctcgttgtagatgacattatttgatattgtttataatttgcagagtaaacctttaaatagaggaagatatatatgagctgtttgagacggagcgcgagaggaatgtcgtgttccaggtttagc

SEQ ID NO: 7963 - DNA, 865 bp, Zea mays
atatatgccgcggactttccagtctgtcatgagctgctcccatacgactcctgcgtcctaccagcccccgtcgcgtaccctacgagtcgcggcccatggacccagccgctgacgcgtggcctcgtaggcgccagacagccgcgcggtgcatggaccgcgttcacggatacggttgttcccgacggcggcccaccgatggttaagcccaatctgttatcgttaatgacatgatcactgtacaattacgtactatcttttgcagaaaaaaccctccgcgccggtccgtgtcagtgcacatagtcacacacaggtccctagaaaggagccttcctgtgatttactaggagtactaatagtgtcctggctaagataatgcaatatccaatgcaatcaaccacccccactcgtctatttcggcctcccaccttcctctttaaattgcccctcctattcccccgtcccgaagctagaggctctctggcgccgacggccgacccacacgcgcgtccagcgatttcgccggggggagatcttgccattccgtggagcaccatccgcggtagcctagccgcgactggggatcggggcttgcgggccgtggagccacccagaaggtagccgggaaaagcttgatccggccggggacggggccttcggaggttcgtccctcgatcgggtgtcgtctgcgaaagccgggtcgaacaaatcgtcgcgactggaggcggcgcggggtcatgggggcgtgggtctcggtcctgctcgggatggacggagccgcggcggccgggcctgctgctgtgggcctgggcgacctgccggagctctgcgccgcccaggtgctgctccggctcgacccgccggagat

SEQ ID NO: 7964 - DNA, 889 bp, Zea mays
aaacaaatttaatcaaagcacatgcattgtagaatattagtttttcaaaagaacatgaatgatacaaacaaagcaacaatgtgaaacaacattgctactcattataggctctaccaaagtttctacctaattttttagcttattgaaacaagctgcacaaagaaagagttacactatcttgttgtcaatcaaactgctgacaaaactggacggcaaacaaaagagccaatttattgttacctctagcagttccctggttcagagtatttccaaggagaaggattttcttcattatttctttcaacttgagagaagttcggatctgataaagcaggattctactcaatagataaaatgcaaaaccaattggagtttactgtgactgattattagcatacctcattacaagaagagtctatgatatccaagtttcttctcagatcagcaacttgtgaaccaaactggatcttgaaggagaatactcgcagtttcgactccattctaggcactttcatcaattctaagaagaactgcgccaggagaacaataacctcttgtaaacactcttagctatcagtcatatctaattggcacaaagctatgtgttgttgattatatacccaagacgcaatcatgatctataagaatgctaatagacttttaggataaaaacccagcaggagtctatatatacgaaggagctggagtgctataagagaaagatatcttaaccgccgccaccacttctctctctacggttgcgggggcctaagctgtagtcatccttcctctcactacccgcatggtgctagcacgccggcatcacagtgtttcatccccacacgtgtggataccatggagacgttgttgctggtgctgcaattcccct

SEQ ID NO: 7965 - DNA, 795 bp, Zea mays
tggcgcactcgcggctgctggcggtgtgcgcgcggtgcgcggagcacggcatcccgctgctggtggacgcggagtacgcgacggtgcagccggccatcgactacttcacgctggtgggcgcgctggcgttcaacgacgccggcgcggcggacggcgggcgacccatcgtgcacggcaccatccaggcgtacctccgcgacgcgcgggaccggctggaggccatggtgcgcggcgcggagcgggagcgcgtgcgcctggggctcaaggtcgtgcgcggcgcgtacctgacccgcgaggcccggctcgcggccgcgctcggcgtgccgtcgcccgtgcacggcagcatccaggagacccacgactgctacaacggctgcgccgccttcctcctcgaccgcgtgcgccgcgggtccgcctccgtcatgctcgccacccacaacgtggagtcaggtagctggctgcccgcgccgcaaacccctcgtcctgtcttcctgcacaactggttactgatgggatacggtggtcgtgtgttccttgctgatcctactaggccaactcgcggcggcgcgtgcccaggagctggggatccccaagggagaccgcaacctgcaattcgcgcagctgatgggcatggcggacgggctgtcgctgagcctccgcaacgccgggttccaggtcagcaagtacctgccgtacgggccggtggagcagatcatcccctacctcatcaggcgcgccgaggagaacaggggcctcctctccgcctcctccttcgacaggcagctgctccggtac

SEQ ID NO: 7966 - DNA, 799 bp, Zea mays
cttgcatgcctgcaggttggggttccatgcaagaggctgatggacacggtgactgtcaagtgcggccactgcaacaacctctcctacctcagtccacggccccccatggtgcagccgctctcgccgactgatcaccctttggggccattccaggtatggatcgatacagctcgttctctttggttactcgaacatatcttctgatcttcagcaagccgtgttcatcttctttgaatatgctagcattttttggggaatggaaattaaataaatatagacgaagtgaaaaataattgaatggggttttctcatgaaatatggccatggttttgctttacttccagctgcatccgcttactgctactttgctctcactcctttctctctctttctttctctctgctttattgaactactcaaagtactgtttgcaaggcaagattaaacaacgctggactacaaaagatttctctttgctcatctctgcgcgttggcctggcaaaaggcagtgttgagcttttttaaggcggcgcgcggccgcagcagtagcagcagctgctctgctgtggtattcatgaatgcatgcttctcctcaattcaaacacattttcttttggaaatagagatcttgatatccacgaccagatttgatggcctagtaaatggtaactagctaggaaatgcatgcttccatcacgcatcatgatgcatcgctaacgttgtgagagattttgaagcgctgggatctatctttgattgctatgagctgccatttctcagtgtcagggaccctgcaacg

SEQ ID NO: 7967 - DNA, 827 bp, Zea mays
ttccaaaaatggcacatgctctctttgatgcagcggtaaatatttccattggcaatggggagaacaccttgttttggactgatcgctgggtgcaaggctataccatcgctgaacttgcgcctaatttgtttaaattaattccttccagagtggtgaaaaggcatacaatgagccaggctcttaacaacaggcgctaggtttcggatattaaaggtgctctgacgatccagattttagttgagtaccttcaggtctgggacttggtcgatgacgttatccttcagccggatttgattcttcaggcacctacagcagcagttcagcttatctcgccatgtttattggttctatcaggttctttccttggaggagaatttggaaatgttgccccccccccctaattgcaagttcttcatctggttggccatcaataaccggtgctggacgtcggatcagctgtctaagcatggtcttccgcaccaattagcttgccccttttgtgaccagcatgaggagactatatatcacctcctcacttcttgcgtgctggctagggaagtttggcttcaggtgctatgcagtctcaatttgactgatgtgcagccgccaagctcctcaagttccttcaactcttggtggaaacatgctgctaggtccttcccagggaagcttcgtgggggttttaattctttagttatagtagtgtcctgggagcttcggaaacatcgtaatgcttgtgtctttgaggggaatcgtactaatgttcaggctgtgctgctttcagggtcaggagaaggtcgtctgtggtgcttggctggagcatctag

SEQ ID NO: 7968 - DNA, 820 bp, Zea mays
accgcgtatcctctatatcgacctgcagcatccctcagcaacagaacggacaacaagaacagcaaggaaaccattttgtcgcggctggtggttgtggtgtcgattccggtgctggtgccggtgttggttccggggcaggggcaggggcaggggcttgctcagcttccagcgccccatctttagctttcggtgcctcctgctcaacaagaggctctgcctgctgtggtagctgcgacgtgctttgccgggcgagctcaggagggccgtctttcagtgactcactagacctcgcgtcacctgccaatctgaagaaattgcagatgatttggatcgattcaggaaaaaaaacatggagaatttctatgtagtaaatatggagcgatggaatgcagtcatgcagagaggccatacatcgggaacgcgaagcttgtcgtgctagcatcagaccggtgcgacaagctgttgttgtaatcagcattgccatcgccatcgtcgccaaccctggtagtagcaggcttcactccagcactggtcggcgctgctgccacctcgcttctcatggggctagagctagggctcagccgtggcaacggcggcagcggcggcagcggctcactggggttgccccccagctcacctgacgtgccatacaagaacaagtggtccttggagaagctcgcgttcccgacgttgatgctgaagagggactcattcgacgtcacgctccagtctgccggcgatgatttcgatttcgacctcgcgaaaatggacgacgggatcctcttggggtccggacactcgtccgccggcgccctggaca

SEQ ID NO: 7969 - DNA, 765 bp, Zea mays
gagggaaccacacaaacgcaggacacggaccaaggaaccgcagagcacgacgccagggaccccggcttccgcatccaaaccctaagcaactcggaccgaatttgccggatttgggcggcacgcagctctgccgcagcccagaagccgtcccctgaactcagagaaccgcgccgcgcagctatactctacccgagcagaggagcgacgccttccctgtgctcgtcccaaaaccctagaaaccccaaactgagcttcctctgccgctcgcacgcggtgcagtgcaagccagctggacgacgacagcaacccggcccggagcaaaagtacgaacaatctcgagcaggctagctagaggaaagggagacgaggttttttacgaccctcgcgcgtacctggagctgggcggcgaccagcagaagcagccgggggccgcctgagaacgaagagtactcgagaacgaagcccaacttcctccctcacggagagagagactgagagagagcgagggagaattttcggggtgttttttttcttctgtgggatttttatttattttatttctggtgattttttgtcagcagcagcggttgcggcgccgggtcgggatcggatcggaccccagcacggagtccaatcgcccgcgcgcgggaggcgcgggccccgccatcacgtgggacgctgcctggtgaggcccccgcgcacgggacgctggctgtgggcctcgccacgtcctttgccgttcgcggacgcttcgggcgtgtgcag

SEQ ID NO: 7970 - DNA, 873 bp, Zea mays
tcgacctgcagaagtatattttagaaagacagaaaagttgaataaacaatcattctcactattgagggatgatttgaaactacacccttacatgttgatcacaagatagctgtgaaatcttaacaaggtggtcctgcaaaacagtatcctcaattgtttgcaccaatgtaccagaagtacccttgttaccccatgaaggccatacaacttcaggaccatccaagcaaaactgagccctatgaaaaattttgtcttcagaaaataaacctctcatcccccaatgtcgaggacttgagctgccggatctaacgatagggaaccctcgttttcttgactctccagcaggtgaaggaggtggtggcctaggtacgcgaggaacactaagtactactggtgatggaggtcttcttagaataggtatgtccctccttgttgatggtacacatgggctcctcctgtgatcatgagcacccttaatctcagatcgtgatgaccttcgtgatatactaggaacaactatcggccgcagcatggcatatggcaatgtatctgccttaactacttcactgccacaagacacagcctttgcaacttgcattattttatcttcaggactatcttgcaccgaagatggagaagtcagagcttcattattgatctcattccctgttatcaagtgagcagctggatccaaagattcattttgagaacaagatggagtggagggtggtgatgatacaccatttgtgtatgtagatggaataccattagctacatcatcaacaactcgtataacatcagcctcatgccaagcccaggcactatcatctgaactaagagatggtggcctggaaaaaccagttcctgcatgtt

SEQ ID NO: 7971 - DNA, 782 bp, Zea mays
ctcctgatggatgtgcatgatggtaaagggcggggatgagcatgcagtagttgctcctcgatcgtctctgttgcattgcatattgcagtattgcgctacatatatatatgtgtaaattaaaggctgctcctgaatttgttcttaatttgtaacgcttctgtttgctcataatgaaccgccagcagcagctattgactgcggtttacacaattgtctgactgcatgctctggcggatcgttctagctagctaattaagaaccttggaagaaatctgtatatatctatacttggctatttcgttcctcctctatttcttaacaggaaaagcgcttcgccttctttccgttgcggggaacaccagctttccatatcttttctttgtacaaaaggtagaggctggaaattaataatagaataataaaaaagaatgcaacgacgacactcgcatatcccacgttacagagatatactggaataatggatagacaccacgaaacaggatgcagagaggatgatctctcttttcgtcgtcgcagtctgcaccaccacagcgcgcgaaagcttgaagcaccggcggcagcaggattcgccacttccgcagaaagagacctattttgtgacgaagctatatatgtcagcattatattcaccttttgcgtcttgggaaactcacgtgtgcagtccaaagctctgtcgaggtagttgctgcctctcttgatttgcgaattggatggagccaactgtttgtttggatggaaccaactgtttgtttggctaggct

SEQ ID NO: 7972 - DNA, 631 bp, Zea mays
cagcttgcatgcctgcagcagggacaaacgcagtccgagcaggagccagcagcagatatggacggcgagctcacgcgcgcgtggacacagagaagcaagcgcgcggtctgccggaacagggacggacagggagctccaaccgacgagcacacgcaggaaacttcggctgggcgcgagagcgcggggaaaggggccgagcgagctgaagccgcggcgctgggcagagcccggacgggcaagcgcgcaggagcagaggacgcgccagaggagaaaccggcgagagcgacatgggaggagcaaaggaaggtgggtccgacgtgcgcggcagcacgcgaaccggtggagggcgcggccatggaagaggggctcggatgggagacggccacagcagcttgaacgaaggacgagttcggaaagaagacccacgggagaatctcggcgaactcgactgggctgaagcacgcgaccccgggcgcggcgagcagggacgacgtgccatggagggacctcgggagagagagagagtcgcgagctggaggaggagaacttgagagagagaggaggagccgctggactgggcgaacgcgccccaggtgatgggagatcgagcaaacgaattgctctgcgagga

SEQ ID NO: 7973 - DNA, 814 bp, Zea mays
tgtcgttctcattcttctacagctttctctctctctgatttttcttttctaggcgctgctcatggggctgatttttctgtacgcgcgttgttgattttttcctgcgcctggccttatcccgtcgccgaccctgctcagatttttacagcgacgtcgatcccttcttcttatctccttctcccatctgtgcgtttgtcttcctcgcagagcaaatcgtttgctcgatctcgatcacctgggcgcgttcgcccagtccagcggctcctcctctctctctcaagttctcctcctccagctcgcgactctctctctctcccgaggtccctccatggcacgtcgtccctgctcgccgcgcccggggtcgcgtgcttcagcccagtcgagttcgccgagattctcccgtgggtcttctttccgaactcgtccttcgttcaagctgctgtggccgtctcccatccgagcccctcttccatggccgcgccctccaccggttcgcgtgctgccgcgcacgtcggacccgccttcctttgctcctcccatgtcgctctcgccggtttctcctctggcgcgtcctctgctcctgcgcgcttgcctgtccgggctctgcccagcgccacggcttcagctcgctcggcccctttccccgcgctctcgcgcccagccgaagtttcctgcgcgtgctcgtcagtcggagctccctgtccgtccttgttccggcagaccgcgcgcttgcttctctgtgtccacgcgcgcgtgagctcgccgtccatatctgctgctggctcctgctcggactgcgtttgtcctgctgcag

SEQ ID NO: 7974 - DNA, 824 bp, Zea mays
aatactacagaagctaagagctactgaaccactaataactccaatatacaatgtgagactgtttctgatgctccatgtttgttatctaacgagcttatagtttgtacaattttgtggttgtatcatctaatgctgagctatcagacattatttgcttatccaagttttctcttctcgttatggtaattctattgatgcagaaataatatgtattcacatagcatgacactgtattgactttaattcattttcttatgccttatcactttgatgatgggcatccaaatataaagttaatttgaactcagcttattgtttttcttctggcaactaattatctgcccaactaaaagcctatacaaatttacataggatggttcttattgataatgggacctaggctggcatttaggttttttgaaatgattagtaagatagttgcatctggtgttcataacaggaatatggcgaggttgaaggacgaggaataagaatggcaaaaagagtagtccgtgctctgggtttgatttttggatgtgtgttcactgcatccctggtacgtggattcttacccgatgcaactctgctaaaaatttctctgtatatgtcctccagttttatgtctctggttgtgctatgtttaactgtattttagtttgattgtcctcctaatattttcaggcttatacagcagctagtaacatggttgagctttcattgcagtatactccccgtatgttttactactatcaggtatgatgactgttagcctgacccctcttttaaaatcagggtgcctgcaggtcgactctggaggtttgcca

SEQ ID NO: 7975 - DNA, 831 bp, Zea mays
gcgagttccgcgccgccgtccgctacgccatggagcagcggcgggaggcccagcgccggtacgacgccggcgagctgccgcggttcgacccggccacgacgctcgtgcgcgagggggactggacgtgcgcgcccgtgccgccggccgtcgcggaccgcaccgtggagatcacgggccccgccgagccgcggaagatggtcatcaacgcgctcaactccggcgccaaggtcttcatggtaagtaagcgcgcgcgcaaacgtggctgccgtattctctctctctctctctctctctctctctctctctctttttcccgttctgagctgagaccgcgagagagagaaaaacgtggcaggctgacttcgaggacgcgctgtcgccgacgtgggagaacctgatgcacgggcaggtgaacctgcgggacgccgtggctggcaccatcagcttccgcgacgcggcgcgcgggcggacgtacgagctcaacgaccgaaccgccaagctcttcgtccggccccgcggctggcacctccccgaggcgcacatcctcatcgacggcgagccggccatcggctgcctcgtcgacttcggcctctacttcttccacaaccacgctgccttccgcgccggccagggcgccggcttcgggccgttcttttacctgcccaagatggagcactccaggtacgtccgtgccgtggcgtgcgtgtgcctccggtggtgcgtgtacgtgcacggtgcaccgcacacatgtgctcagcgcagcactaacgtgactcactgaactctcagtcgctcaatcctactataacgtaacgtacacgtgcgtcgtct

SEQ ID NO: 7976 - DNA, 797 bp, Zea mays
atggcttccgtgtgccggcgccgcgacgacgatccactcatctcgagaggtgaggtgcggagaagcatcaacgccatcgtgcgggacgtgatgctgctggagaaccagatcccctggcttgtgctcagctccctcatgcagttgatgccgccgcccgccgggtctgtcgtcaatgacttccttcttctcatggcctccgccttccacatcgtcggcgacatcagcaatgccaacagccaaaccggcctgccggcagccggagaattagataagccgccgccaccgcatctccttggcctcttccatcgccgtcagatggatatgggcgcggtgcgcacccagcagcaccagggcagcctcctctgcgtccccttccagctggcttccctgtccagcaccgcggtggagctcgctgagatgggcgtcaagctcgccccaagcaagacgaagacatttggggacatggccatgtccaagcgggggcgccgctggcctctcggcctcttcggcgagctctccctggcgccgctggtcttgaaccgactcaccgagtgctggctcctgaacatggcggcctatgagttgtgccagccgcaaggcgacgctaccgatagcttccctgtcagctcttacgtcacgctcgtgtcgctccttgtgaaccggccggaggacgtgcaggagatgcgcgccaagggcctcgtcgtcagcgtcttcgacgacgcggaaacgctcggcttcttcaaggcgctagcgccgcacctgagcgtcggttgccgctactacgaggtctttcagtt

SEQ ID NO: 7977 - DNA, 862 bp, Zea mays
tgattctttcggtagtggatcatcgacactgccggggcctggtgcagcgcccgaagcagttcaagagattcgtagcttcattcatacgtcgcccgacgcttgtgtttgtttctgtcggaaacacgcctgttcaatgatttgagctgtggcgattcactggtttgtagcaagaagggagcgaaggttcaggagctgggaattaatgcagttcctcagcacccacccaaagtgactaggccttggatctgtgctggggattttaatgagattttggatgctcattcatgagcagttcggtggggtgactaggcctgaacgccaaatggatgacactgatcttggattcatacgattgcctttcacttgggataatcgtcagctagatggtaataatatcaaagttgacacatacatgctataattctacacaatcaaccagcacaatcaagcgctgccacatacatgcatcacaagccaaataagctcaactggtagcacaagattcattacaactaagctcacagcatgatcactctgcgttcaacttaaatgctcttacaggtaccaagcatatatagatcaaagtacggttagacaatttaatttagtctttgatctacttcataggttgcacaggcacatgaccagtaaccaccatattttcccaaaatagaagtagccaacacactaaagccacaaaacactgatgaagttagcatatgacataggggtaattgatcaccttagaacaggcagggacagctagtaatcagtgccaggacgcatagtaacaccttctatttagcccatagggaacatccatgtcgcaagaaacatctcgtgcttccagaccatctgcagg

SEQ ID NO: 7978 - DNA, 856 bp, Zea mays
aataagagaatagaaggccatggattactgaatgaaatagtagtaaaaaattactgtaatacaacttttaaaaggtatggtaatgcattaagaacaaacatgtaatcaaaaggttgaagaagcctacctcttgagttattagacgagtcttgaacctcgacaccagatcttggcttgtcgtgggtgaaattgcacgaagtactgtcctgacttcttcctctgtaatgggtgatgattctcttcttgctgaaagagatgctttcgaagttggttccaaataagacggattttcatccttgacagccaatgttccggtttcctattatgccaagaaatagagaaattttaaagcaaagaacctggtgcaggtgcagcttaatatgtctgcaactcaaatttcacgtgtagcgtgcagaatgaagacactgccgtacatgttccatctttatctttttcgagggtgcaccattagaaatatttgcatcaccaccccctgatttcctcttttgagtggatttggatgaaggtgtagcgctctgagcgtgccctgatggtgttggtttagcagggctgctatcatctggttcacttttgggtacaagttttggagcaggtattggcgagggtaggtcatcttcctgtcggacgaaacagatacaaagatgagttctattccatagcattaggtttgctaatgtgtacatctcgcctcctataaaagaatatgttgagttctaagaagaattgtgattgtgatccttacatatgtgcttttgtcgtcaacatcagactcattttccccagcagctcggcggagcagcctctttagctcctggccggacttgctcaagttgtc

SEQ ID NO: 7979 - DNA, 850 bp, Zea mays
cttgcatgcctgcagccttcctcatgggccaacgcctggctgcacatatccaacctcgacgggaaatcctccgtgaccctggtcttggaatccaaatcatcctcaagagtgccaattcgatcaacgaaagttgatctatctaagccccactccttcttgacagccctgaagccatcgtggagcttattgagagcctcctcgaggtgcctgaactgctcagccttccagttgagcttaccctcgacggtggccttctcctcctccggcttcaccagcatgtcgtccctcatcaccacctccctcggtgtcaacaccctcttctcagcctcgcttcccctccagtccttctctgacaggagccccctaagccgcgcgatctcgttgtcacacgcacgaagggcagcctcgtgctccacgcgcctcccctcagcgtcctcgagcgccgtgaggaggcccctcttgtcgccctcgaggccctcgatcttctcccggagcgtgcccttgagcgcctcgtgcgccgcgtagaggtgcctcagcgcctgcccattcttggccagcctggactccagcaccccgcaccgatccccggtggcggcggcctcctccgagctggccgcggcctccaccgcattccgctccgcctccgcccgggcatcccgcagccacgcggcctggtccgcgccggcgcgcttgagaccatcggcgaggtcggagttggcgcggagctgggcggtgagcgcctccaccttggcccggaggtcgtccagctccttgcccatctcttcaatttccgctgacaaaaaatcacagcaaaatgtcaagccaaaacccaaacaactaacaaaatcgc

SEQ ID NO: 7980 - DNA, 829 bp, Zea mays
gagggacgggatgaacctgatcccatacgagtacgtaattgctcgacaagggaatgagaggatagatagtattctaggccttggtccggcttcaaggaagaagagcatgcttgtcgtgtcagagttcatcggctgctcgccctccctgagcggtgctatccgtgtgaacccttggaacatcgattcagtagccgacgcaatggactacgcgctggagatgccggaaggggagaaggtgttgagacatgagaaacaccacagatacgtgagcacgcacgacgtcgggtactgggcgaacagcttcctgcaagatcttgagcggatttgcctcgaccataacaggaggcgttgctggggcatagggtttgggctgaagttcagggttgtggccctcgacccaaacttcaagaagcttgcggtggagcacttggtctcggcctaccggaggacgaagaagcgcgtcattctcttagactacgatgggacgctgatgccgcagacttcgctcggtaagagtcctacctcaaggacgatagacatgttgaacagcctttgccgcgacaggaacaacatggtcttccttgtgagcgcaaagagccggatgactctgaacgaatggttcttaccatgtgagagccttggactagcagctgaacacggctgcttcctcaggtaaaataataacttcctgctgtctcccaagcagttcgtgatctgctactgctggagagcacacacactaatcgctgatgctgtcgacggttgtgtaggctgagaagagacgcagaatgggagacatgcgttccggtgatagactgcaggcatgcaa

SEQ ID NO: 7981 - DNA, 893 bp, Zea mays
ttttctcttctagtaatgaacagtcagtgatgagagagagagagagagacagggggcacaccgggtcttgttggcgtcttgctggttccgggttgggacagcttcgccttcgatcgatcatgccatcctaattgactcctgattcggcgtctttcacttttattttttttcgcgtaatgttgtacgaaagttcaaatgaaagggaggctatcattaggcagcgggcaccaacagaccggcagcgctagcagacagacacggacagagaactcgattccacctttcctttccatggggcaaaaataaaaaaaactgatcactcaacagctttatttgttgcacaaattgtgtaaacaatagtattataaatttataatgtgtagaaacaagacgccagccgtcccatgcaacgcaaaacggcagcgcagtgcgtacgcgacacacacaggcccgtctcaaaaccggccggggtcactgtgtggtggtggtggtgggcgggcgttcggtccggcgtcaacctcagagccctctctttaaattttgcctctcccccgtcgcgttggatccatcattcgttcccgatcgtccgcgctgacgtcgacgcgcgccacgattaatcaagctgacagacgtactgaagctgcgctggctgctctctgtttggaggatcatcatcatcaaacgaatgcatgatgaaggccggaggaggctgagcttatattagcgagtagttgacccgagcccgctgctgcactgcccacgcgcgcacgggtgcaggaagagcggaggacacatacggtttgctcaaggagagccgcctttgactcccatcccatggctgatcatatcgtcgacaataatgtgctcgcgaatgcgatagtgattctgtacct

SEQ ID NO: 7982 - DNA, 839 bp, Zea mays
cctcttcccagctcagtggccaacctgtcacaaaacctgaaagagtttgtccttggctcaaacctcatcacaggtgccataccatctgggatcggcgacctggctaacctttccgtcctctacttagacaacaacatgctatctgggcacatacctgcttctattgggaagcttcgcagtatgtttgctctcaacttgtccaagaaccggctgtccggagaaatcccagcatccataggcgacaactgggctcagttgaccgagctttacctgcaagagaacagcctcagtggagccataccagcagggctagctggatgcagaaacctgctggcactgaacctctcgtccaacgccttttctggacctataccggaaggcctcttcggtagactggaccagctgaactggtaccttgacctgtccaagaaccagctcgcaggctccatcccagacgaattcagcaacatgatcaacctcgaatccctcaacatctccagcaacagcatctctggtaaaatcccctccactctcgggtcgtgcgtgctcttgcaggctcttcgcctggaagccaactccctggacggtcaaatcccgtcgtctcttgccaccttgaaaggaatcaaggagctcgacttctctcgcaacaacttgtctggtaaaattccagagtttctggaacagttcgatagcttgcagtacctgaatttatccttcaacaatcttgacggccctattcctacgcaaggcgtcgtctttggcaatgccacaagcaggcttttcctccaggggaacccgaaactgtgtgcagaaactatagcagtgctaggcctcccact

SEQ ID NO: 7983 - DNA, 799 bp, Zea mays
caaaactattcaaagatatgcagtgttgcaaggcccgtcatgctagtggttgcaataatccttcatcagatgctttcttgaccatagaacatatgacatccatgaccaaaataaataacattggcaaagtgctcatagatgtagaattgtttcaccccaggctttattgtctatactatacactatatagcatagtatgtatatgtcctgcaatatataggggactaggactgactaggctcggctagttggtctgatcacctggccggtccaacagcgactagggttgactatacagtttgtaaacaatggctataaatgttgtagaaaattgaatcctaataagatcacaaagaaaatagtcaatgttatatttggtgctctggtatcactatgtttcaaacaaaaatgagttatattctacttataacaaccattacaaaatggactcggtacatattcttcattttaagctttgcagctatacttcatagcagtacttggccaatcaaatatgccactcacaataattaacatagaggttttactggaaggtaaaatgacagcatcgtagcagtaaaatactacaataaataaaaggactctacatttctgtttgttattaataagaacgatctgtctaaaaaggcatggcaccaaccgctcacttacatcttagaatatctttttagttctaatgtgtggtatggaatagtaaaatgtggcacatctgtagtaagtaacaaaaagcacaaggggcatttgcatgtttcagtgttcaggccaattagtcccttat

SEQ ID NO: 7984 - DNA, 895 bp, Zea mays
cagggagaagaaagacatggcagatgagtctttgaaacacaggcacatatagagcatatgggcgcttcgctaaccctaatacatattagccacggtcacattcacatcatgttgcttattagtgcgtagataataagcaagtaattcaatttaatttaatttgctgatgattattccaaatggagcagcatcgtgagatgtttgagttttgcaaccataaaaaagcccggtgaaagcgcaccagagcgttgaaatgtaggcatgtgtgctaggaacgaaaattcatgccccaataatgcaacggtcagagcattgggagcagttcagacttgagagccggtactaatagttgatttggactcaagaaaccatcaaaccgccactatcctatatataaactaccacaggagtaatcctttgacagtatcaacgacgacgcttggatttatttaggtcaagtcttggaagccaaataaaaagcctaagtattagctaactatggtctagcaaataaaaacaatagagactaatcgataagtaaaatttattagaaaaaataaaattttaattaatcgagtctattatgtattccaaataataaaccctatatatgtgtatgcacaatcgtgcaagtaaccatcactgtcgccctagataagttttttgcgtttggcactggcggattggcttccaataatgtcacatcacaattctcaaccactacaaaagtaacaaaaacgacacgtgaaaaagatctttaatctgtgtatgtatctatggatggcagacatacggatcaatacatacggttttgacgtgaacgatagatagttaataattacctcgatgggggagaggctggaactcatgaactgggcgacggtctcgttcttgt

SEQ ID NO: 7985 - DNA, 862 bp, Zea mays
gtgtcatgaccgtgctgattccgaggaacaccaccatccccaccaagaaggagcaggtgttctccacctactccgacaaccagcccggcgtgctgatccaggtgtacgagggtgagaggacgaggaccaaggacaacaacctgctcggcaagttcgagctgaccggcatcccgccggcgccacggggcgtgccccagatcaacgtgaccttcgacatcgacgcgaacggcatcctgaacgtgtcggcggaggacaagacgacggggaagaagaacaagatcaccatcaccaacgacaagggccggctgagcaaggaagagatcgagcgcatggtgcaggaggcggagaagtacaagaccgaggacgaggaggtgaagcgcaaggtggaggcccgcaacgcgctggagaactacgcgtataacatgcgcaacacggtgcgggacgagaagatcgcgtcgaagctgcccgccgatgacaagaagaagatcgaggacacgatcgaggacgccatcaagtggctcgacggcaaccagctcgcggaggccgaggagttcgaggacaagatgaaggagctggagagcatctgcaaccccatcatctcgcagatgtaccagggcggcgcgggcgctgcgggcatggacgaggatgtgcccggcggtggcgccggcaacggaggtggcagcggcgccgggcccaagattgaggaggtcgactgagcgagccatggacggtgatgatctggatgggacgcttctgtgcgtgcggtgcagctagagttgagagtgtgctacgtgaactcgtgaaggcgtattaatctgtgtgtgcgataataatctggggttaacacctgcaggcatgcaag

SEQ ID NO: 7986 - DNA, 736 bp, Zea mays
cttctgttttgtctgagttcagccacttctggagccagaaccctcgtagggatagatcctttcaaaacatctctctcagtgtattaaccaaattttagacatttagaagcaaaattatataaatgataggaactcaccatcccttgtacacaatgtgaaaccatctatcaaatagtttgtttgtgtcgaatgattaatcacgattaatcacccttacggttcctaccacttgtttaggtactctgattcggtcagagtgattagaagtgtccgatcaatttatcacagttaatcgtcgacttatcgcaaatcgtgataatgcgaccatgtgccctgaccaactagacttcaaataggcagatatgctggggtagctctgtttgggccaagaccattagtgtttctcttttatacctctcccactcttttccttgcctcctcagtcctcactcctcaccccgcagcctccagatgtcagatgcagttgctgtgtgtgcaactgcatctcttcccctcctccatccttcctcggtctatgtcagtaccacaccaaaaagaggaacagattggagcacaagaggttaaataagttggtctatgtcagttactacgaaaatatatcaaacaggtttcaaaaaattaaaaaggttggttgcaaaggacagatgagcaaccctctcatgctagatgaatttcagtgggaaaatgaatgggttgatgaaaagtgtcatcaatt

SEQ ID NO: 7987 - DNA, 823 bp, Zea mays
tgcattggtgttggttgccatcgttgccttgctgtgatcttgtggcctccagggataatttgaggatcacagtacagattactaaacctaattcctgaagaagaaacaaaaacccagttgatcgggaaaaaaaagaagggactatattccatcgacaatgcatacattacaaaggagcattaaaacacttgtacaggaggaagggcaaattcagtgaagtctgttttaaagattattctaaaaagggacaggtggaatgttgtgcggccatcaatgtaagtaattagggtgaatcattggaatacggaatatttaaaaaatgacctaatgaaagctaaaaaaaaagtttatgcaaatctccggtcccttatggatgagcgaaatctttggtgttttgttggagcagctggtttgcgtgctcttggatcaggaaattcttaggaagttgtagttagtggttgtgacctggccttctcttttttagtagtttctttatattttctttgggtttcctcttcggactcctttgcccggggttgcagcctcgcaggccatttgtattcggcttttcttcttaatgcaatgatacgtagctctccttcatattgagagaaaaaaaagtagagaagaatctagctaactgaagtatataaattgattacagcatgattaagttcggaaatttcaaatattaagtgatatgtaatggctatgagtaataaaaaaatggcaaccacgtagtaaaaatgcaagtgtgatgggctgatggcccaacgaaagacacatgcaaaacttgtacctccttgaaagtcaagcttagatt

SEQ ID NO: 7988 - DNA, 776 bp, Zea mays
gttttccatagaaatgtgtggttactggatgtggttgtcgattattgatttcttattgaactccaactatttgattattggacgttgtcgtgtaaaagaagttgcctacaaggctacacatctaacgtttccctgatgtcatttttgtacgaaatataataataaaaaactatacaaaagcttccaagttgtgttccacccgtatagcgattttagaaaaaaaaaaactataaaaacatgtctactgtttttattgaaagagagctgccgaaattaatattagaagggaaaagagaaacagtaccaaacatacagttagcagagaccaccgctctgctcgagacacttgaccacaccaacagagagaaaaactcttacaaaacaaaagagacaaaattaaaaagccactaaaagcacccactaacaacctaggggcccgaagccaacagtgatcaacatcctctttgactaggaacacaatattgaaagggtgacatcttgtatgttgaaaaattcttctattcctttccttccaaatattacacaaaaaaataacatattagaccgtcaaagtcccttctatcgatcctatggattcttcgcctgcatttccaccagcagctgataagggaatctcccgacgaacattacgcaaatgattaaggcctaactaacttgctaacatgttccaaacttgccttaagaaaaaacaattcttgcagagatgagtaggcgaatctggttcaatattaaatgttagcagttaagattttctt

SEQ ID NO: 7989 - DNA, 844 bp, Zea mays
ttctcttcgagctcgtctttgtccaccgagcaatctgccttctgaagcacatctgggcttagcgcaacaaactccttggcacgccgcttccttttgaggttcagtggcaatgctttgctagccggttttgatagttccctttccaatgacaggtctctgtacgcttcaagagggttcacgttcaagataggaactgggttctgggtgggattcaggtttgccatactcaagatatttgaagccatcgaggaaactgagatgtcataatgcttctctaggaggctgagctcccagaggactgaagcgagtgcaccactcagatatggatccgtagcttcggggttgtatttctggataaaagacgaggggtaacatgatcaaaggaacacaaagtcgatatagagttatggagaaaagaacatgggaacacatataccgcaactaagcaagacagagaaccgccaccagaatcattttccaacatattgcggcacttgctgtttttttggaggagatgcttcagtgtgaccaatgctgaaataatcatcaaacatgtaaacaattatgacattaaacaaaagaggaaagattatgcttgataactaatcccataacactagtcagtaatgaaatgtattcaagcatgtttgatacaatactatacttattgtaccaacgctcaaactaaatagagacaagtactcctgagtcctgacgagtgtcccgtgcaacccacccttattaatatcaatcatcttgaatgttatagaagcttcgcaggcatcagctaaataaggatggggcaaacaaaaaccagacctccagaacaaacctgctattgctt

SEQ ID NO: 7990 - DNA, 843 bp, Zea mays
aactgcttacatgacaatgatatttaccatcactaaacgcaataaaagataaacaagttacctgtttccctccaagatcatgcattctcccctctgacataaccctttcaacagcatcctcgctttcaaatgtgacaaatccaaagccacgtgagcgtccagtgctatggtcaagcataatctgatgctcaaccaccttcccatacgatgagaagtgctcctttaatttatctgcaaggttcatattaatcatgtttgcatttgaaacaaatgttttcaaggtagctggtggctgatcaaagttattatattgccagttcaatacaatgttgccatatcttttgcttacaaacaaaaaatgtttcagtgtcgcttgtaccttcggtaagagatggtggaataccacccacaaagatcttttttgtcttaggaccgtctttcgatgacatttcctcttttggaacagtccttttgacttcaaccttcagcataaaaacacagttgagaatattgtccaaaattaagatcgtgatttttggataacgaacatagaagccttactgttcttccatctatgacatgttcatcctctagaaccctgtcaagcacagatggatcggaaaatgtaacaaatccaaatccgcgaggcatcctagtatgcttgtccttcatgatcacagaatcagttatagctccatacttctgaaaatgctttgtgaatgtttctgcacatgcaaatggaacatataacgaaagataagcaaaataaaaaagttatcacagtacaacaaaaatgtattgctacatgagatcagcaatctatattctaatgtttcttttata

SEQ ID NO: 7991 - DNA, 883 bp, Zea mays
ggtgtttggtgctatgatatcacgatgtgctgctgccatactgacctgtttgatactccttgctaagcggccttccacagcatgggtcatgaggaccacatgtaaagtaggtccactttgtcagttccagaccttgcacaccacatttgtttctagggcacagatcagtcggtggtcccaacacacaaacatggggtcctcgtgccacttcccagcaccgaaagcacacaccacgagaactcagcaccggcaccggcacgccaccagacactcggccccatcagagtctcatccaaatcgtactcgcactcgcagacgcgtcatgcaacatcgcactcgccgtcctcatggccttgtcgcttgcccaacaatacgatccccattggactgagctatatatccatgtcgaagtggtctcggatcggaacaccatcaccaatctcaactcagcgagctctccaccagttttacagccaagaaagaaaagaaccaaccatgatcagcaccaagaggatcgctcagctggccaagaagtggcagaggacggaagcgctcgggaggaagcgccgcctcggctgggggacggcggcggcggcaaagaaagccgacaggtgctgcgcctccgtggcgagcaagggccactgcgcggtgtacacgactgacggggcacggttcgaggtgccattggcgtgcctcgggacggcagtcttcgccgagctcctgcacatgtccagggaggagttcggcttcgcgggcggccacggcaggatcttgctgccctgcgacgccatggtcatggagtacgccctgtgcttgctgcggaggggcgcctctgcggacctggagaaggcgttcctcagcaccatggcgatgtcgtgccact

SEQ ID NO: 7992 - DNA, 826 bp, Zea mays
atctttttcatcaagcagtgcaccggctctggaggaggaagccatattctccactaactttgaactcagcttgccgatttcgcaatgataactggtgtgctcagttttgaccttgaccatttcggtcatggcgctctgtatagattgcacactaaatccatttgcctctagatgggagattgtcctgatcttgtcctcaaaccattccatgtcgttgcctatgcttgcttccattgtaaccttcaccaagtccgcgaatgacaccatcatacctaatgccattccttcgcgtagtgtcggggggacttcttggagtggaatgaaatgtggttgttgaggtaactctttaaacacatgcattgcttcaactatatgccacacaggtgagctcttgacgaacaaagcctgcggtgaaggcaacaagctctcactcgatggagaactgtcgatgatgcactgtgtactcccagcattcttaagacctaaaactgacctctcatccacttccccacagggttgttgagccggacaatcaatagacatgatagctgtttccatcacattgttgttttcagctaacttggtagtagcagcatggtctgtgcacatgtcatcatttccattcggttcaataaggctgttcttggtcataaccgctggttcttccccaagttgagcatcatgtatgttagtacctgaacacagaaatccaatcattaatctactacattcatgtatgccttcaattatgtagcaaactatgccattttgaccatgggtagagtttctgcaggtcgacactacagaatcgcgcgggtgtccaata

SEQ ID NO: 7993 - DNA, 922 bp, Zea mays
cccggggacccctttatagtttacctgcaccaatattgaatacatgcttatcttcaactacagactacaacactatttctgaaagaatctcccaaaggttcaagtagtccactatagctccaacagacaaggcaccctttatatcagatacccattttctgttgaggattgtcctcctattagcaatccttttaggaatgatggcaaataacctaggagccagattgctcacattctgacccaagagctatgtgtgctctatttcccacttctgaaaccaaaacaatggagaagaaagaccttgcctttttagaaacttgtatagggagtttgcccaatgcctgcctggattagttttatgtagccacaatcatctcatacgaagagcccaccgtaattccttcaaactagaaattcccaaacctcccaaatgtgcacaccatcccccagacaaccaaacaatgtcctcccttgacatctttacaacctttccaaagaaaacctttcttatcttatcaactacatctaatgcccatggaggaaaatcaatggccatagccaaatagacaatcatactggtgagcacatgttgtaccataattctcctaccagctctagtcataagatcagctttccaacttggaagacaatcagccactctgtctatgattgattgaacctgttccttggtcagcttgcgaagggagagagggattccaagatatttgcaagggaaatcaaacctgtcacatggcaataaattctggaccagcagtaaggtcatcctcagagcaccggatggggaaaacattagatttctgctcgttgttacggagcctagaagccttcccaaacaaatccaaaatactcattgcaatggagatatctgcaggtcgactataaagggtccggggggttccaa

SEQ ID NO: 7994 - DNA, 832 bp, Zea mays
atgattctggtgaccttatcggcgttcctgccgacggacacggtgctcggcggctcctcggtgttcggcgcgcacacggtagcgttcgtggggctttacctcgtcgcgatcgggagcggcggggtgcggtcatcgctgctgacgttcggcgcggagcagttcgatgacgacaatgcggcggatcgcgagaacaagctgtccttcttcagctggttttacctatgcgtcgactttggcccgatcgtctccggcctgttcatcgtgtggatccaggagaacatcagctggggcctcggctttggcatctctaccgcctgcatcgcgctggccttgggcgcattcgtgctcgccacgcccatgtacaagcgctcgacgcccaccgccggcaaggtatgagccggctctagctagcgtgcgcagtccaataccgcgcgcactgacgagtgacgactgacgagttctcgttgcttggcaaggcgtccgtcatctccgactccgagacgggcttggaagcgatatcggaggaggcgggctcgtcgcagaagctccgcgccgcgacgaaggcagaggagttcaagaccctgctgggacttctgcccatctgggcgaccagcatcatcgtctcctcggcgtacacgcagatgaacaccaccttcatccagcaaggcagcgccatgaacgtgtccgtcctgtcggtgcaggtgccaccggcgtcgatgggctcgttcgaggtggtctgcgtcctcatatgggtgctgctgtacggccacgtgatcgtgccggcgctgaggggatgcgggttctcgttcggcggcgacggcgaaccgtctca

SEQ ID NO: 7995 - DNA, 828 bp, Zea mays
tggaaccagaaataaggctcgcgagtctttatcgcgcgacgagacagccccaggggagtgcacagaatcatgatcactgccctggtagttcattgctaatggggttaatgcaagctcctgtgatacgtcaacttcaccaagcttagaagacgagtcagcaggtgtgatcctgtaccagacaaagttcaccaatctgggtcagggtaaaggcacctcaaattataacatgcactgagctgtttatcaagcatggtttgttaccttgcgaggggttcggtagtatcaatgttttcgaggaaattgacatcttcaggagcttggacttgtgggttttgagtacagttgggttcaagtgaaaagccaaggttgtccagcatatcatcctgaccaatcccagcctgaatcaacgttttactatcatctctgactttctttccatggtgaagaacaccaacacgtaggccacctccaagaatcgcagtcactgcctcgagaacagttttctgcattggaaatgctgattaaacgagaggaaaacccattgagcaggaaaaaaaatcaaaaagaactctaatatctttacacataaaaaataaacagatgtcctgcacatacctttagtgagccaacagttgcactttctgggatttcaacaagaagttcaggcacgttaaaagacttaattttaagtttcactgcaagaaataaaggcaatctcaggactaaatatagatagtaggagattaaatgaacttgctggggagtaaaatcttaccatggcaatcatttgacccacaagatttctggaatggcattgaattagtcccc

SEQ ID NO: 7996 - DNA, 840 bp, Zea mays
agcttcgggcgccagacacgtcactgacgcagaccgttgtacgtgtggcgtgtagggacggacggacggacggacttgcccaccgcagcagcctcctcctcgtatacgtacgaccgtacgagtacgtagaagcgagcacacgtatgtgacacagcctgtacaacaactatgctcgttgctcgagcagtcgagctcgaccacagtcgggcgcaggctagtagcaacactgttgtagactgtagtagactagtagtggtacagcagcagctagctggctgcggtcctgcacgcactagactagtagactaggcgtatgcatgcaaacagccagagaacggaatacgtactgtgtacgttttttttttaaaaaagctaggcacggataaaggctccatccaccgtccaaaaagaaaccacaaaccaggcgggcagagataaaaaaccaaagacgtgcgtacacgcctgcaaagctaccacactaatactataccagcctcagggcggcctttatttggagcccccccctgcgcgtcacgtctcgaggtgggtggatcggtcgaagcaggcgccttgcgttgcgttgtgttgtgttgtgtccaagcaacaaggggcgtgccgcagattctattctcgctggtcaaaaaagagcaaagggtcggatgccacgactgctcgacgcgcaacgcaatagattgctggtttaggttgttgttaactagctagcagcagtaactttggcccatgcaggcggctagctaaagccagccagcccccagccaggccgatccgagctcgatcatgtggctgatgtgcctggacagccggtcaggtctgaggagc

SEQ ID NO: 7997 - DNA, 820 bp, Zea mays
agcttgcatgctagacaagaaatcctgagcatcaacaataaagacaaccccagcagctttaggcaggacttcatcaagcttgggcttgagcctagcatgaccaggaacatcaacaatatgcacaggttttactttgcctttctgcacggaagggcaacaggaaggtttagcagaactattgcagtcagcaaatgcatgtttcttcataagagaaaaagctattcacttcatttttatctcaatatgttggaaaaagaatgagctctagaagtttccataccctttcttgctccgaatgcagcacaaaagtatcactgttttcttccattgaagtcacagttccttgatgtgatgatccgtcccgaagctggcaagcacagacaaattaggagagcaacaaaagattgtataagatgacccacctacttgtaaaacttgctattgatacaaatgccaaatgatctaagagtagataaaaggggaaaatatcctggttagtcaactaaaaacaaaccaactaatttatatagaaaaaaggaagtcaatcagaataacaaagatatacatgtaagcatgataactagcagaactgatatccatctagaatgctaatctcacaccgtaaatagaataaaaaaaatgaggttcagaaattattttgcaaacaagataacacagccttgttcttcaattgtaagaacacgaccaaaaatattggaagttacctggtagaaaatagtggttttgccactgccactgagcccggatagcactatggtgcttggtttagaggatttcagataagatgctgcaggcatgc

SEQ ID NO: 7998 - DNA, 806 bp, Zea mays
attcgacctgcaggaaagaaaggccaagaccatcagggtgagcaaaacaacaatggctgggatgtcaaaaaactggatgaccatcaaccatatttaagagtaggatgataagtcatacctctatcaaatgatcggaggatagctcaagggtgtccattggtggatagtcattgacattgctgccatttattacataaatatgtggtcaggctgaatataaaagacaatgtgttttgaaaagtccaaattctaaataactccaggcagctggtagcatacctgaaacccatatgctctttgttggaaaagagttttactgttttagggcctgcgatgataaaaggcacattattattgtttgaaaaagaatcggagctataaagttgcagtggcagagcatatcatgcagttctcaacaaagaaatcgctagaacatcagtgtttgtggaaatttcaaagaaacaacttataatttgaggaaactcaaaactgtcaggcaaaaaaaataaggacttggcattaagttggtaacacattatgttttcagtgaggtcaaagtgcaagacggcaataaaatgagagaattccctatttaaagctagtatatgagtgcttccttttatggccatgaaaattacagtctttatttcatgctggatctaccttctattttcaattacactaatgttaactattccatccggagtctgatgagtgccatgtgaaaagatgggattgcatttatggtctgcaattctctaggtagcagctaacgccatgaagcagctagagcagcagcaggtgga

SEQ ID NO: 7999 - DNA, 787 bp, Zea mays
agaaaggagaaagggcatactccacagtacaagtagttcaaaatatgcaggtcatgaaatgtttactgttattcaaggaaaacccataataaatcttcgaaaatttacaagaaatgtgtttatgaagctgatgcttagtcccaaaaatagaatttttagttttatttaatgaatccatcaatccaaacacattttctgttatgacgggcatcccatacagccgtcgcagccacaagataaaatgggtagagtttgttagattagatagagtttgttagatcggatagagtttgttaagatcaagttcccaaactaatctactgttcatctgcactaatgttcacagccaactactgtccatgcgtgaacagtgccacaccacggcgccgcccctgccagcagtcctaatcctgggacgacggcgcccaagcgccggggtcctagtcatagacctcaaacctaccactcgtactacctccgtaaccctaattccaacattttcctatcaaagtaaaaatccttgcaaaaccccaaatttacaaataaaaatataatcgtgcaataaactaatacataacgcagaaaaacaattgggaccacaaatttcgcagaggaagacagaccttgagaaccaagtatcaagaacatcagggtcttgatatatttcaactgattttccatatttttcatgagcttctgcaatcgcctcctcttcggttctagcaacaatagagtggtcttcacatttcaaaccaacaatataccaaactggtatacgatgacccca

SEQ ID NO: 8000 - DNA, 772 bp, Zea mays
tcctgtatgcataaaactgacagtggccacggttccttcggcgcatgaagaagggcaataccctttcagcgattcaaacagcctattgtgctgcaattgcaaactggtacaggcaaagctgaactggtctatacacaaacgctagctacctatccccagccacctcgctatttcccttacaaagacggagagaccagaagccacacaataatccaacacatgcaagcaccgcaaccacaccccaaatcctctcgtagtcgtagctctgaatcttctcctatacaaggacctccgatgcttgctttcctgcctgcttctcaatatctacagctagtgatgagctactactgaactataattcctactaaaagactgtccctggacgctagctatacttcaccgtcatccttgcttctagatctctggagcgcgtaccggcacgccgtgatggcgtccttcaccgtgaggaacacccactcctcccctatgatgtccttgatgtacccagacagcaccagcttctccgtcacctccagcctggggttcgtcagcgctatctgcaaggagcaaccatctgttagtctgtcacgagtactcgtcaattcagtgaacaaaattccggtgattaccctgatccctttacgatcaaggctcttgtgaacctcgactagcatcccaatccccgtgttgtcgatggaagtcacacctgcaatgttcatgaggcaaagtgtcaccggtggactgaaaactcgaggtgaggacgggacgaaaa

SEQ ID NO: 8001 - DNA, 897 bp, Zea mays
aagctgtcggtttggtagaacttctgcttaaatttatgaagaagctgaaaataagttgtgccaaacagagccatagccttgacggtgtgggtgtggctaagtaggtaaaagccttgcctttgaccctttgtgagcagggcctggcgtacctccccggcggcgtgtgcaggtcgagcatggggcggcaggcgtcgtacgagcaggcggtggcgtggaaggtggtgggcgacgacggcgcgccgcagtgcctggcgctcatgttcgtcaactggaccttcatctgatgctcctccgctcttgacgttcacagcctcgtgcctcgctcggcagcgctagatcggttgccgcctttatcctatcctatccgactacgtattactagttgctttccgttgcacctgtgtgctacaactgctcgagacaatgccccctgctgtctgtttatggcctaagtctactgtggtggatcgggagttggagaacaatgcccctgctgtctgtttatgtgtgagacttaaccctattactactgctgttatcattgaatctttgtgatcttttgtgtcattgtgtgacctgcaaaggttaatcctaaccacggaaaatttaacattttagcatcatttaggactgatttagtgaccagcggatttagatgagatccctagggtttgaataggaagaggtttctccccagagatcccaccaccaaatcctggtcacaatcatccgttagcgtgagtgacacctggacctgcaactccgatctgacgaggtggacggatttcaggcctgtcaagtcaacgctggcgagctagtaataattacactgatcaatggcgctggccggcggccagcgccgcagaggaacagcggcaactgcaggcatgcaaactg

SEQ ID NO: 8002 - DNA, 818 bp, Zea mays
aaatgtggtgcttgtttaagaagtcaaaatattcttcgacaagactagagagtttgggttatttcccacagccagatatggttcagaagttctggaaactatgtgaacaacagctcaacatatcaggtcttgttacaggacataccctcctgccttggatgtgtagcatattaataagtatcaaattgcaaaatagggtgtttgcatgatttaacagttttactaagtgtgccttttatgtttctgattatttaaattgattaaatatctgtgctcagatgaaacagaagatgaagatgcaaatgaagaacatattgaagacacaaacagggatgctgtcatgattgcagctgcaaagctagtgcttgctgatacagtatcaaaggtttgtgctgcatttttatcctgtgatatggttctcaagctttgtacttccaactacagttgtgtcaattaaccaccgtttgcaaaatattggttgcttccaattgttcgttgaccaataagtaatttttcatttctcttctgtttgcaggattatcttggtccagagattgtttctcactatgtatctcatggggcaagtacgacagagataatcaaacatctaattacttctctaaagaaaaatgcaaactttgacatgggaactctattttttgaggccttgaaaagggtaaatatacattggttattattattttttatagctttgcatgtaaaatacatattggtaaagtatgcatgaatggttttaattatttgtattttttgcatgaacaacaacatttgttctcctgcaggtcgactatagagga

SEQ ID NO: 8003 - DNA, 797 bp, Zea mays
cagttatacctcttgccttgattctcaagaagtttttggctgaccggagtttggaccacccctattcaggtggtctgagctcttactgtttggtatgtgacttttccagatcttcatttattttagaatattaattgctgcctatatgtgtattagggtttatatatattgggcctggcccatctactgcgtgaggttgggtccagcctacctagggtttctctagccgcacacttctaagagactaaggctgtatccagcaacgttctctatatctatcctctatatccgttctttacagtctcctctaaaagatttcatcctctatatctcattcctctccaacaacgtcctctaaatcacgtcctctatacgtaaatacctatattagagatattttttattttttgtacatacgtatttgttatactctcaaatgtattgtacatattttagttttgctaaaccggttatttaaagtattcaaatggatagaagaccgtttagggaaactctatatatagagaatccaacaacgtcctctaaatttagaggaccgtttagaggacgctgttggagagcgtagatgaccgtttgatcctctgtatttaggatagatgaggctttaggggtcttgttggagtcagtctaagactatacatgtacacccctacacatgaatatatgcatttaattttgctgcaatacttcttctaacatggtatcatgagtctatcttgcttctgctcctccttggtcgctatccctctaggtccgcagccacccttcgccgtgtt

SEQ ID NO: 8004 - DNA, 879 bp, Zea mays
gtgctcgttctggggttggataagacccaagaactttttttagctttcttcgaacaagtaatcatggtgctgaaccaacacagatgtgctactaaacacatctaacgagtcaaacgccgaagcatatcccaacgcacaaccccggttaatcttgttacccatggattgaatgagattgaaaaaaattaagaaagagtttgatttagggtttgttcgctttcctctcaatctatatggattgggtgggattggatgggtttaaatcccgaacaagttaaaatccttcatattttttttccaatcccatctaatccatatgggacaggaataaccgaacaagcccttagttgagatttaaacccacacaatctcactcaatccatcactcaatccatgtggattttttttttccgaatacaaaggagggctacatatcattaaattaaagtagagagaaaaaggacctatggcccaggacaaacagaacacacacaacacaaacacacactctaaacacaaacacacactcacccttacaaagcacacaagctaaccgaaccctcaagcagtcacaatcccctgccgtagcccgtaaccacacagggaacggttaatcagtaatcgacgaatcataacccaggttccctaaacagccatcaaaagattagtgacatggtatacatacatgtgagtaaattatttttagtactcagaaaaaaagataagcaaatgctcaaacaaaaccagaaacacttcctaacaagattacaagaaacacgctcccgattacagcactgtcactgtgacaagattattaccgcatgctgtgccagcggctcagtccgctgcactgcaggtcgactctagagggatccccgg

SEQ ID NO: 8005 - DNA, 775 bp, Zea mays
acttccagtgtaggtcacactggctatttgctgcctccttgcctcgtcttcgtaaagactgtctagcaatagctcgtcaaatcccccagcctgttgagcaaatgcaagtaagtaatttagctctgattgcttttactaaaattctgttataacttatggcaacatcttttacagataataatctatgtgaaattcaaatgatcatattttctctagagatagtaaaagtctacataccaattgattgtccacttgttgatttgtgtggttacttggtgcagtaaccagtgccaattcccatccagtcttgtcaagggcaaataagtcttgagaagttgccatcttgttttcattacctgcatttaagagacaattactacatagtgctcaaggcctaacacatgatcttccttaagtaagtattctctgtacaaaatagcaccaatgcaaaattgctgctagtgctgtagtgcacagtatgctattgagcagtgcatggatactataaacattgaacctggtgctacaatagcaagagccagtgcattgcttgcttcaaggtctgcaatcatggggtttacttcttcatccaagttctgcaattcatcatatatttgtaaaacatgaggcttcaaagaagcagacactgagctaaagtatagaatgttcttgaaacatagaggaaatactaatagattcccggtagtcgcccgtggctgaggttccacaaattcttccaaaggatcagcagatggttgtggctccgcttcaggct

SEQ ID NO: 8006 - DNA, 843 bp, Zea mays
atgattttccagtcaattgcttgtcaggctttccatggacaattttattatcccttttctctgaaccagtagtcagtgattgttttgtcatgatttttgacttcttaaattctctgctctcttcttcagcactcatgtttaatacaacatcagatgcggcctcaacagcaatccttccagtaggactaccaacaccaacatgctcattttccttactttcagcattcctcaacagcttgttggatttaaaattctttggcacttcaagggcgcaaaccacctccaagttaggttccaaaacaaaaccttctagatgacagctctcttcttcaattttcacctcttcaatctgcctttctgcccgcagagatgttggtgaatgctcctgttctgtgtacatgtcaaaaccagactttgatgcagcagacttctttgtcttgggatgcttaggatcctgttgtaaagatgctttcttttgaggaactgccaaagaattatcacctatttcatgaccaccatctttgacatcctcctcggtccctgacccttgccctgaagtacttgagcaatcagtagggggatcatcttccatttgtcccagtcctggagtcccaccaatatcaggtgacctcaccaggtgctctgtagtcttttcactctgatcaggcaatgctacatttgcggcttcagatgtttttggcaattcatcataagccttgcagatctgctccacagcaacattaaattgttgaacatattttctttgaactttaagagctcgatctaacagatcattctttttcttctcagtaaattcctcaagatctgccagagggacaaagg

SEQ ID NO: 8007 - DNA, 818 bp, Zea mays
taatcgcatgattggtttccctgctatccgcgtccatgtcctccgcatgcgttgactgcgtccaaacccctgattggttgcatgcacaggcggagactgatctgcacgcgcgggtgcaatgcaggctgctttttcaccaattggatgcatgagcggggacgggagattactagatcccagcccgtccaggtcggcgcgagcctggcgttggcaagcgcgccaaccaatcatgcggtaagagacagggtatgaaaccaaacttccctagcaaaaacacattgtaacagaatgtgttgcatggtttcttcttcctgatcacaaagaaggcattttgtgggatggtccaaacctcgacgagccaatcgatccgctgtccagcagcgatttaaagaagccagccagatgaaaaatttacatcttggaggtgcccaacttttgcagatccttgctgccggttcaaaggtgaccatcccctcaaagaaacgatgatgagcagatttagaggagtattcccctgaggcagaaggggtcaagcggtgttggtctgaaactcctgggtgaagttggaagccttgaatcaggtcccagaccatgaagtactcagatagaaattgagctgatatgcttcctgagatatcatttacccagccatattcagtcaaggcattatttactgttctactttggagaaatctgttcagaacccgagaaacaaggaccggagccaagtcaaacagagcctgtccatggagccagcgatccgtccaaaaggaggtttgggatccgtctcctgccaaagaaaccactgaacatgcaaa

SEQ ID NO: 8008 - DNA, 784 bp, Zea mays
cttgcatgcctgcagcaccgaggagtgccatcatcttcatgggaaggacagtacttctgcatccagaaaggatgtgctcggtattcaatgaggccatctctatttgttggaatctggggaagaagacataataattgcagttatacagacggatcagaaatatattctgatcaataccttcatgcgtatccataaacttggattgtcggcacttacaaagttgttgcaaacatcgcatttcggatgaaaaaactctttgtagcaggatttgtggtatggctgatcatcatgcatagcaaactgcacaaagatgcattatcatgaatcggttgatcaattcgatgaacagtaaatggaaaaatactactctgacactctcttatacctcatactctgatatgggtttgttgcaagcaaaacatctgaagcattgaggatgccaaactgaatccatacaactaaggaaacgtccatggccaattgggttttggcatccagcacaaatcctatacacataacaggacttctggtcaaatcaatgttggccatttttataatatggaaacgaaacagaaggagatttctatgattttcacaactaaaatatcaaataaatcagcgcaaaaaataagtacctggatccaccccgtgggtaaacatgtggggttggttcatttgctggaacatactgtcgaggaggcacccgctcaacaggaatattccattgaggcactggcacatcctcaataggaacattctgtcgaggaggagactctgcattcag

SEQ ID NO: 8009 - DNA, 816 bp, Zea mays
acgactttcatattctcgttggcaagtgccagtcctgaaataatacatgcacaaataacaaaaaaatatgatttacagctaagaaaatttgttgtacagaatttaaaaggtaatatctaatttacatcataccatctaggagcactaccagacaaactcatgaaagaagttgtatgagatttaaaagattcagatagtccgattttaataaaatcggtgtggtcatccttcatggatgagctatcgattcatgacgtggacacatgattattttcgaaatgtctatatgtgtgtcttttatgtttccctaatatttaacccgtttaaagcaaacccaaagcaccatattgcaagcatgcatgatagcacctggagatagatctgtactggattgtcccctagttaagaacatttttttcaagttttcactagaactgcatgccaagtaaaataggcttgtagcatgagaaacgatagtatgatacaagacattaggttggaaaagctcttaagctcaccgtaaatcccaaattctaacagtaccatcttcagagcctgagtacatccagttaccatcacaatgaaatcccacagccatcacattgctagtatgtgaatcatagctaattacctgctaggtgtattctcattaaataaggaaaaggaacatggagatccatatggattgatgttgaaaacatgtaattgtatgtaccggctgagggctatttgagttgacgtcaaaaaggcggatatgaggattgccagcagcagctaagaaccgcttgtcaggggttatctcaaggcgattaactt

SEQ ID NO: 8010 - DNA, 850 bp, Zea mays
agtctacctgcaggatcataatttgtgtgtatttgctgtcagacacaatttactgccctccacccaatgttagaaaaatgcatcttacaaagacactaaatttcttagtgagttggggaagaattcttggctctaagttcacatcgaggctaattttctttttcttttttggccatcacataagctgaagcctatatatacacttgttatctttattgtctcaactggagctggtgttctgctgtacagagttcaagatgttgggaagtccaaggctgaagtagcagcgaagagggttatggagcgagttaatggggtgaacatagttcctcatttttgcaggattgaagataaagagatagagttctacagtcagttccacataattgtcctaggtctggattcaattgaagctcgaagctacatcaattctgtggcttgtggtttcttaggtatgctttttcagtaccatttttgttagatatatactctatatctgagtaatagagttcaaagggagactaaaaccttaggtctacaacatgttcttgttctgtgctactgtggttgacttgttgtaacattacaccttgagggttgcaatgaactcattgtacttatgaattataagattaataaagcttacagatagatttagcaatcaattatgtcttgtccccatgttaacctaaatgatcaatggtcaatgttatatgttgcttataactgtctaaattgttttcttgtgttaagtgacaattaagatgctgtgcagactcaaggttttggttatgtggccacttatctgttctcactgcaggtcgacacagaggatcgccgggtccagacc

SEQ ID NO: 8011 - DNA, 841 bp, Zea mays
gaactccctttccatcaagcacatttcatcattgagcttcttgatagcaagcttgcagccatcaggtagttcagccttatagactagaccataaccaccacacccaatgatgttttccttgttgaagttatttgtggcttttacaatgtcagagaacgtgagcttgttttcatttccctttccttgtggcaccatgatcactccatgctccaagctggagttgaatgtgcttgtttcaagatatccgttgtcctcccttctaccttgggccgttaaacgatttatcctgatggagacaaggagacgccacagcaacaaaagaatggcaatcattgcaaagaacacaccaaatgcaattgcgagaatggccttcttatttcttcctcctgtggataccagaggcacatcggctgaatcgcatcgacgaccgatcataaagccgcacagcttcggattccctagaaagctggagttctgaaatgtaccaaattggccaccggttggaataggcccttccaggtcattgttagaaacgttgaatgtggaaaggaagtgcagattctccaatgcaactgggattttacccgtgagatcattgctggataaatctagcaccagcaggtttgtgagattgcagatagatgtggggatcggtccggttaagctgttggagctgatatcaagtgaaaggaggcctttcaactgaccaatctctgggggaatctgacctgtgaatctgttgctgcttagatttagaactttaggaaaagcaatcggtatgcggtactgacgtgatggaccatcatagactggcagatcgaaaacgcttgcgtccaaatga

SEQ ID NO: 8012 - DNA, 826 bp, Zea mays
aaacgcggccgcgggagctccaaaaccctgcggctgcctgccaccagttggccgtttctcctcgtggtcgtcgtcgtagcatggcatgctggtcccgcgcaccacaccgtcccccgagtacacgagtggcgagctcgccgtctcatggtcgactggaggagcacggctggcaacaacaggagagtagtacgggtcgaggaggccataggcggcggctgggccggccatgttgctggcggcggcggccgcccctcctccgactccgaggtagtcgcgagacggtgacgccgcgggaagaacgacgacgtcgtcctcgaacatctctggcgtcacgttcttcgaatcgagcagagacaggaagtagttccctcggtagccgctgcccccgtcacgcgctcccacgctgctgaaaaccatgcagaacgtcggcttgtcagtcgtacaagagcacgcatcgaggtagcagtcatgtcgatcgtatgcggcgcgggtgggattggatgtgtatgccggtgcggtgtacttacggggcgctctggttccaggcacagtcggggccggggccgcgctcgctcggcaggctcgagtctgccgctgccaccatgccgaccccggcggcgaacgtgccggcgtaggggatccaggaggggaagggcgtgtgcgcttgcgtctgccgaggagactcccacatgccggtgtctcgtgaaggggaggagctgctgcgactgccaccgactactggagcttcgtgtgcttcttgggccatgaaatatactacggaactagctgtgccagtgcagtgcctgctgctacgttgcagtcctgt

SEQ ID NO: 8013 - DNA, 803 bp, Zea mays
tacttaaaatttagcattttatcattcatgtagcattaactgggctccaatagaatatgcattgtggcaaatttactaactaccgcaatgtgtacatagcgagaagctctggtccatgacactagtattataattaatttgaatattatttcctataaacattgtcattgtcttgaatttggtaactgatatttgtggttcgatattcggatactaaaggtacatgcatacgaaaggatgaaccgagtatttaactacacattggacccctgtggcccgatttacatcggcattggagacggcgggaacattgaaaaaattgacatggatcatgctgatgaccctggaaagtgtccctcaccaagtgataaccaccctgaatttggtgggctctgccatctgaacttcacttctggccctgccaagggcaaattatgctgggaccgacagccagaatggagtgcatacagagagagcagttttggtcatgggattctagaggtgacttcacttcagtgactccatttcttataatgatccaacatcagagacagctcagccattctacatcttgcattactcatcatgagttaacgtgcataatgcagaaacttctgtccagtgtttgtatgtgttttaaatctagtttttagttctcatatgcatttgtgtgtgtatgtgcatgaatccaggtcctgaattcaacatatgccttatggacatggcaccgtaaccaggacgcatatgcagagaacagtgtgggagaccagatctacattgtacgacagcctgacaagtgcctt

SEQ ID NO: 8014 - DNA, 895 bp, Zea mays
gcatgcctgcagctaaaagcctccacactgtaacaaggcccccatatttagcaccgaacagaagtaaaggcaatacctgaaattcaagcaaacacaggctcctaaaattattaagaaaaatgtctcttgcagtgctgccagatctgaaccaaatttggagctcactttgagagtcattgaaggttcaccagagaaaatcacttgcgccgtcgatatcatggagtttgcaaacggaagcacagcttgagaagcacgaagcatgtcttcttcagtcaaccggaaccttctctcattctccacctgcggcctgcccaattgcaaactcatattacctctggttcaatcatcttttggacaagtcaaaattcaaatataatcaaatcatacctctgaggaacagaatctttgaagaaagctaagcctaagatcataacgccgaggtgacagagagctgagattgggctgcaaatcatcacccaaagccaggtaccagattacaacgaagatacataggtgaaccaataactttcgggtaaattgaatatcgaaattcgcatgcctgaaggtgacgtctcttgacaatgagcatgagaagaacatcgatccaaatccgaaccaaagtgctgatttagccatattcctccacatcaccaattcaacgatcctttcccagagaccttccaagtcagattgctccaggaagtcagttcctacgtgccaaaagaggaacaatcacagtggaatccttagcaaaattgaagcagacatcccaaaggctatagccatcacgagcaggccgagacaccattgctcaccgcaggtagcagcaggacaagccgggaccacagccatggttatatcctcctcgttcagcgccgcctctgccttgtcggca

SEQ ID NO: 8015 - DNA, 832 bp, Zea mays
atgcggccgacggcgcgcgtgatcttgcgcgtgacgaagttctcgccgcggcgcggggactcgtggttgaagagcacgccgttgcaggcgaatacgccgtaggcctcgcggtagttgacggtgtaccagtgcgcggcgaccttggcggcggcgtagggcgagcgcgggtggaagggcgtgtcctcgcgctgcggcggcggcgtggagccgaacatctccgaggagccggcctggtagtagcgcatgggcttgcgcgacaggcggacggcctcgaggaggcggagcgcccccgtggcggtgacgtcggcggtgtagtcggggatctcgaaggagacggcgacgtgcgactgcgcggcgaggttgtagacctcgtcgggggagatggcgtcgagcgcgcggcggagggaggaggagtcggagaggtcggcgtagtggagccgcatcgggggacgcggggccgacggcaccgcgtgcgggtcgtggtagatgtggtccagccgctgcgtgttgaagttggaggagcggcggatgaggccgtgcacctcgtatcccttggacaggagcagctccgtgaggtagctcccgtcctgccccgtgatgcccgtgatcagcgccaccttccgcgccggcgcgagggcccgcggcaccggggcggtctcgtcgtccacgtcgccgccgccggcagtggcagtggcggccgcgccgttggaatgagccatttgcgaagcgaggaaggggattgattgccacgggttgggggtgcggcgggcagatctgggaagcaaatttgggggggaagaaagcaggggaggcagggagtatttgtagggcc

SEQ ID NO: 8016 - DNA, 893 bp, Zea mays
cctgcagatgccggtgatgagccagtcggtgccggggctggacaagggcaaggcgatgtacctgctattcgtgaaggcggagtcgcgcacaccaggcggactggtggcgcgcccggtgttgacgagctactaccggagccggcagttcctggagcggccgcacgacccctacaccgagtacacgagccccaacgaggccatcctgtgcgtggactcgtaccagagcatgtacgcgcagctgctctgcggcctcgtccaccgcgccgacgtgctgcgcgtcggcgccgtgttcgcctcgggcttcctccgcgccatccgcttcctcgagaagcactggccgcgtctgtgccgcgacatccgcacgggcaccctcgacccggagatcacggaccgcgccgtgcgcgacgccgtcgccagggtgctccgcggcgccgacccggcgcttgccgacgagatcgaggccgtgtgcggggggtcgtcatgggagagcatcatccggcgcctgtggccccgcaccaggtacgtcgacgtgattgtgaccggggccatgtcgcagtacatcccgacgctggagttctacggcggtggcctgcccctagcctgcaccatgtacgcctcctccgagtgctacttcggcctcaacctgaaccccatgtgcaagccaggcgacgtggcatacacgctcatccccaccatgtgctacttcgagttccttcctctccagtgcagcaacggcaaggcagagccgagccaccgcgacctggttggcctcgtggatgtgaagctgggtcacgagtatgagctcgtcgtcaccacctactccggtatgtgtgtatgcatgtctgacatcgaagatccacgacgattgttatggacgttttatgtgatgcatg

SEQ ID NO: 8017 - DNA, 869 bp, Zea mays
aaaaggcgcggtgtccctcggaggagcagcggcctgcggctggcctcacgagccaggggggctgctggcatcagcaatggcgatggtagtagtggcagtggcagtcgatgtgacccatcgatggcatgattacacacgtagtgccttgagttttgtcccggcgcgcgcggcgaggccgccgagggcgtggcgccgtccgcccgccgtgcgccttggggccgcaccgccacaggccaccggcagcatgcggctgggctcctggccgctggcgatcagtggcgaccaggagtccaggacctgcctgctctgctcctgggcccgggcaccctggtggcctgactagtcttggtcttgcaggaaagagagagagagagaggcaggagtgcaggaccattcggttgattgattgattgccgagctctcggcgcaggaaatatgctccggcagtgcgtgcagccagcgtgtcggctgggttagtggtcaccgttcaaacaaaccggagaaacacatcctgacgaaattatgggagagagaagaattttgttggcgtgccacgatttctaaaaccgctctcgagagcatgtagagtgcacaagctccacagaggaccactcgtttgttcttcattgttcaaaacaaggctccacgtaataaataaataaatctatctatttctacgacagtaacaacggcacgtaggagtaggagatagctaccctgcctcagcaatgctgctggcctgctgggccattgcggccatgccatgctgctgctactgctgctggccacagtggcttgggccttggacaccttggattgctgggtcgttgccccgctgtaggcctgccacggctcgctgcacggctgca

SEQ ID NO: 8018 - DNA, 839 bp, Zea mays
tcccggctcacttctccccgatctacttccccgtcggaaacgcggcgaccgggttcttcgtcatcttcgccgtgatcgccggggtcgtcggcgcggcctcggcgctcgcggggttccaccacgtccgcgcctggaacgccgagagcctgccggcggcggcctccgccgggttcattgcctggacgctcaccctgctcgccatggggtatgtatatattccccttgctggtatcggtatcggtggttgcagcagtctggcgagaacgaagtagcagcactacccagtcgggtcccgttggtccattgccgatggatatggatttcctgatgacccgtttccccctgctggtgctgctggggcaacttcgttgttggtttcaggttggcggtgaaggagattgaactgcacggcaggaatgccaggctggtaagaacgatggccacttgcactactatttgattactagctagcatatctgtgtcctgaaataaatctgcaagaggacgacacgtaggtcgggtttaattaattgttgaactgcatggtggctattagtaataacgcacgctaactgtgagttggctatggcccttgagctgatgctccccttgtgcagatatgcatggagtccttcaccatcatcctgtcagcgacgcagctcttctacctgctcgccatatacggaggcttgagatgaaatcatcatactggatggaggaagagactgcattggaatggagatttatcgtttccgtacgtatcgaattgagctggtgtgcatcggtttcacgggacagagtgtggctttcctcgtgttttcgttgtgggtttcttccaa

SEQ ID NO: 8019 - DNA, 821 bp, Zea mays
tgcagcggtgcgccgaggacaagacaatcctggtcaccacatacgagggccaccacaaccacccgctgccgccggcagccgccaccatggcgagcaccacgtccgccgcggctaccatgctgctctccggcccggccaccagccgcgacggcgcggccgcgctcctcggccacccggcggcgctgttccaattccaccactccagcagcatcccctacgcgtccactatggccacgctctccgcctccgcgccgttccccaccatcaccctcgacctcacgcagacgcccggcggcgttgtcggtagcggcggcggtctgctgctgcctcatcacgggctcgggctccatcgcccgcccagtggaatccaccccgtggcggctccggcgatgccgttatcgccgctggccacgttgctccagcagctaccgcccacggggtcgatgtcgctggctggcctcgtcgcgcgtcatgagcagcagcagtcagtgatggagacggtgaccgcggccatcgccgccaaccccaacttcaccacggcgcttgcggcggccatgcatctcgtcggttatggcaggggcagcgcatcaggctcagcctactccacgtgcaggtaacatcggcagcgccggggaggccaacggcagtgcgggtggtgccgcagcaggtcccacggcagccggagcatatggagcgtctggtggcgggtcgccgcggttcgcgacgcagtctgcttgcaccacgtccacaacttgagctaattgatctgtgcagagtttgactgtcagagatcatcctctgcaggcggcattgaacttcaa

SEQ ID NO: 8020 - DNA, 835 bp, Zea mays
atcctctagtagtcgacctgcagtatgttcttgtccctgctacccgacgacaaaatgcatgagctccatgctaataccccagtccttgtttggtgacctcccatatttctaatccgcttacagcgagaactatcccaaatctgtttcaagtataagggttacctgtatgtcagtacatcttattcatggatttcagaaagaatttgaaattgccatgaaacctggcatcgtagttgcatgaatacaaatgaagcaattccttatgcgatgccatattaagctatcatatagttgaataaagctcagttccaagtgtgacctgtgattaaatttttgattgaattgcatttgtgaaacaagtgaaaatgtgagaaatacatcagttcagtttttcagataacaaaactgcattagtgaatagatcatttcccatttggcactaagttaggtttgagaactgactcatattgcagtagcaacatgaaaatggagggagcgaagcaaggcatacctggacatctccaaggccggtgccaatggaaagataagagccttcccgtgaccaatgcactgcgcatacgctgtccctaggccccaaatcgcagagcttggtgacctggatgttggttggtgggttagggggcgtcatcgaatccatcattgtcactgtcctaccagaggtagacgcaggtatgcagcagtaatcttgttcgtatagctgagacagtaccttgctattggacgcggaccagaggtagacgcaggtgccgaggccgacggcgagcacgttctgcgaggaccagtcgacgaggttgagataggggtcgtggtgcac

SEQ ID NO: 8021 - DNA, 865 bp, Zea mays
tctgcgtcggggttgaagaagccccacagagtgttgcacagagaaacacagatgtgtctgttatacgtagtagctgtctttctttctctctctctcgagtctcgtcgccttcacatactggctggcgctgcagttgccagaggccagaggccaccatgatgactgggccggtcgagcaggcaggcagaatccccccaccgaggagtagagatccaacccaaaagaacagaacaaataaatggcaaaagggggaaaaaaaggagaaagaatcacaaagaagaaaaaacgacaaacaaactgcaaagaaatcgatcaaaccctgttaatctctgcccccccaaaaagcgtataaataatcctatctacttgcgttcttcagttttcacgtggccgttggcgacctcttcctcctcttggccgggggtggcgaggaggtggcagaggaatgcgaggacagcgcctcatccgagcagcacaggttcactgctgccatggtaatggtcgtcgtgctggcgacccttgtccggacgttgcctatcaccagccgctgcatcagtctgtagcagctgctgatcccttcctatattcaagcaaaaaaaaaaaccaaatgtttgtcacgtatatacttccaaatgataaagctaaaaaaattggcatatcgtaatagactaatagttcttgtgtggagtatatacctctgcaaggccgatgcaccagctgacggcagccccagggctgaccgactccagcgacggcgtctcaccgatggcgcagagcacggccgctgccgccattgatgacgggcagtggtccaagaactcgacgtctgtggcagttccgcagttagtacactggaggttggaac

SEQ ID NO: 8022 - DNA, 886 bp, Zea mays
ttcgcaccaagacattattcctcgaattggttgtttcctctcttcttggtctcgatggactttatatccatttggctggcgattttgattattggggctgttttctttctaaattctctaatcctaacagtgacattcgccagcatacataccagtgtcctgttctgccatgcttatacaactgtacggcatttgattccctaagaagaaaagactataaaagagtcactgaaacattttcacacaaagattatcagcagccgttttcattttaagatcggcgcaaataaaactgtacgacagtttttagaactatacgatgattagaatttttatcctggaggtttgcaatacacagttctttttcttgatgaaagctctttttgttttgttttttcgtttgaaatggatgttgcatatgctgacaagttagtttgcttctgaattttagcaggatggcatctcgagccccatagcagcgcacatctttgacttctgcgacaatggcagcggcggcgacctcttcacggccgtgaacgtggcctcagacctgttcacggcgccatcagaggatgcctcgtcgtcgtccgtagtgacgacgcctcccgcgccctgcggccacggcgacgacatgccgttgggcaccgccgcggcgcctgctgcctcggccttctcccccatgccgtccttcgactccaccctctccgctctcctcgaagaagaagacccatcggttccaaacccagaactcctcctacccatcgactacccgttcgcggcggcggcggctggagacgagcctcaccccgagcagcagcagcagcagcagcagttcgcgcaggtgccagtaatgcttccactggccggtgcggcccagcacccgggt

SEQ ID NO: 8023 - DNA, 868 bp, Zea mays
atatggaagaagatagctgggcaagattaggttggagctgggttcatactgctgaaagtatgcgggtatcgacaaggagatgaacagggtaaatccaactattatcatgttcctggagcttgctgcttgggtgtatcgcaatgtggacaaaccaagcgcgacaattagcgcccaggtgaagcacagaacagaggcggccaaggcaagaggtatagaggctaggagagctccgattttacctacagcaaaggaagctcagctttaggaagtccgcacttcataaaaaaaatgatgggacataattgcagtatagaagccgcatcataccaaagaaggagaagatgactaacacggctgccccaagctgcaaagccctcctgctgcccattttggttgtttcgagggtgtgtatgttctctgttaacgttgtcgatcctgtacctgtaccccacactccagcaataaacgttgaaaccccttcaagcccaatcgctctgctgacaactccacgtgttggtgggcttagatttaccagcagtgacgccgcatggtacgatgaaagctgcatatgcacaaccatgtcaaggcacgctagccatcaagtatccaaagcatttttttacacttgcagatgagtgtctgttctgctgagagaaactactcaccgaatcaactgaagcaaccagagaaactattatcatgatgataaccgtcttgaaatggaacgttggagggccccattggaacggatagggaaccctcacccaggcagcagttttccacgcagtagaaacatcggtacggcagcgcctcatggtctctaaatgccttctgcatgaatccaacaatatgtttgaactgggtatgt

SEQ ID NO: 8024 - DNA, 813 bp, Zea mays
cggatctgcgtggcaatgtcgcgcaccgctccggggccatgcgggatgaacaccgaggacgccttggacgacgcgccgatctccttcatggtgtcgaagtactgggtgatgagcaccatgtccatgacgtccttggcggtggtgcccggcacgttgacggagaaccccagcacgctgtccctgagcccgtccacgatggcctgccgctggcgcgcaatgcccagcccggacaggtacttggcttctgcctccccctccgcgcgcttgatctgcacgatcttctccgcctccgccttctcgtttgcagccgccctgagcctcgcagctgcgttgatctcgttcattgcgcgcttcacatgctcgtctggctcgatgtccacgatgagagtctgcacgatctcaaagccataagccgacatggccttctcaagctcttcctccaccgcccttgcgatctcgtccttctgctcgaaagcatcgtccaaatggagcttgggaacgcttgctctgatcactgtacggacgacatcatcacaaccatgaacactcacaaagtagcaagaaacaaactgctacgtaccgtcaaagacgtaggcttggatctgggaccttgtgttgctcagtttgtagaaagcgtcacttgctttgtcagccagagcgcggtactgaatagatgccaccacattcacgaaaacattgtcctgcacaaatccaggccaggtgtgttagaagctgctaccacaatccataaatttttacaagctaagcagaacatacatacctttgtttttgtctcacagcgcacatccagtt

SEQ ID NO: 8025 - DNA, 819 bp, Zea mays
aacgccggcaactccgggcgccgggcggtgcacggctgcaagtgcagacggccggcagatggcgccatggcggagcgggcgtggctctgggggtgccgagagcgggagatgaatcgaaacctagctatatctccgccgcggcaggcatgcatgaaccatcaagtcgtcgagcgtctccatgggaattaataagattctggcgggagagggggcataaagagcggcacatggcgctgctttcgcgggcgggcaatgcaaatgcaaatgcatggcaatccatccaaaaccgcagacgacttaagggcagtgttattactggcgccgcgctgcgctgcgctgctttgtgtgacagcaaatgcaagtcaatgccatttatgcggtggcgcgctcgccagccaaccccagttccagtggtactactgccagacagcagacagagattttatttgcgagggagcgcccgggtatcccgtgtctagtgtagtgttagtgtagtgtagtcatccggccgggcgacagatcttgctttgcttgccagggctgcctcaggctcagtcaggactgcatgcatgcagcgatgagagcccggccgcggccgtacgtgattgctagctagctagctagctagttgccctggacttgagagggatccatccatccaattccaacttccaagcgtggcgtggcgtgacttgaaagggcacgtacggtagcgcaggcggtccttgatcctgtcgcccttcgccggccggcattcgtttgcattgcatttgcccatgctggctgggggtgcatctgagactctccctgcctgtgcct

SEQ ID NO: 8026 - DNA, 819 bp, Zea mays
gcttgcatgcctgcagttgatttgtgtgtaacattctgtagagaaatggttcatttcgattttgggaggctgaatgcatcaagattgatccaagaaacaaaaaagtccattgcagatcagatgttgggacaaacattaatggaaacggtgaatttgttgtggattatgattacctgattgtcagtattggggctagacctaatactttcaacacacctggtgttactgagaattgccatttcctaaaggtaagtactgtaaggcacagtgaagcaatgaagtccctaattgaattgatgaacaaaggttttgcaggttctttatatatatttttttgtatagatgccaaatttagcttggatcctactttttacattttaattatatgtcactttagctttatcctacgtaaaacttctaactttgatcaagtttttaggaaaaaaatatattaacatctacaagctcaagtaaatgcgctatcaaacatctacatgcttttttctacaaacttagctgaagttagtgaaattgttttagagcaaagatattaatttggtttactgtgtctatccatggcctgttgctttctgctgcttttgatgtaatatgtaatgatgtgacgttttttaattattgtataattgagtgtcttttaaaagagtgtcactattgtaggaagtagaggatgctcaaaagatcaggaagagtgtcatgaaatgttttgaaagagctgcccttccaaatctttctgaggaagagcgaaagaagaaccttcattttgttgttattggtggtggcccaactggggtagaattt

SEQ ID NO: 8027 - DNA, 834 bp, Zea mays
gacacggaaggggacgggaatggcgacaggcaggcgtcgtccgcggcagtgcaggcgatgacgatgtgggctcggcggcgcgtcgcttttacgcaagaaaccatccatcgccggaataaagaaggcgcacgacggagtgcgtcttcccccctctagtttatctgctgcccaagcgacaggtatcgcatcgctccccgatttgccatggatccgtcacggcaccatctagtttatctagtcctgaccatgatttctctttcacctgctaactgagagttagatacgccggggatctgttgtgcggcaagagcgacctcacgcgatgcgttcatgcatgccaatatcaatatgccatcactgcatcacagcaccgcaccccctgccgcctttttccagcgatcttgtgtcgcgttgtagcctttgtaaaaattcagtgattgtagatgcgtggatatgtggactaggagcagctagcggtctcattagcggccgggccggcttgtttgacgtttgcgttttcattttcggacttgaaaggttttcacctggtccatggatctacggattggtgttacgaattactaactgcttctttttccgcatcagcgactcagcgagtaactacagccgcccctactttttttttcacgtcgttgtttagttgttgcttgctagcccttcctgatagcctcatttattccccacaggcccacacccccgcattactacggcaccagcacacgttgcagaagccagaagagaaggccatcccagaacgtcacgctgaaaggggcatcgatggtgagcaaaaagagcggacgggactagtacaaa

SEQ ID NO: 8028 - DNA, 864 bp, Zea mays
accgccgccgtgtcgggctacctcgtccagagcttgacgcacaaccgctaccgcgcagacttcgtctcgatgccctgctcaccgccggcgccggcggtggcaatctcgctcgacttcctgccgtccgcgcacgtccgcgtcgtggccgtggccgcgcaccgcggcctcgtgtgctgcgtcgacgtcgacgcgatgcggccgacgtgctactacgtgtgcaagccggccacgcgacagtggcgggcgctgccgaacccgcgggtgcggttcgacacggtggctgtggccatggaggcccggccctccggtgccaccagggcggagttcaagatcgtccgcttctcgcgatcggtagtcgtcaagccgggggaccggctgcgctgcgaggtgttcgactcgcgacagttcgcgtggagccaagctccgcacgtgccgctcggcccgttctccctccaggcccaggcgcccgccgtgcgcgcgcacggcgcgatgcactggctccgctggtccgaccacaacacgggcgcgcaggacgtcttcgcgttcgacgttgaggccgtgaagtggaggctcatcgcgctgccgcaggaggtggaccagatggacaatccgtgggcgcgcaagaagattggcgccgtggaggggaggctgtgcctgctggtgctcacgcacgcagctggcgctgtgaacgaggaggtgctggaggtgtgggagatggctaactacggagaaggaagatggaggaagaagatgacaataagcttgaaggacctccacgacctccacgagcacgacaggcgggcggtgatccacggtgtcctccactcctctgatgtcgccttcttctgcaggtcgactctagag

SEQ ID NO: 8029 - DNA, 811 bp, Zea mays
agaactttcaaatgtccgtgacacatgcacaggcgtacgaatgacatcttcatcttctggtgggctccatgcttccaagggatgttcaggctcactagtttctaatgaggttcctctagttccttcaagcagatctaattctacttttgcagctgagcaatcatgtaaatcttccccttggatagaaaattcaggttctgaaatatttgggtggctaccatcagaatcagactcatttggacccagcaactccttggagtctttgtcaacaaccatttgttcaaaatgatctgcttctgtatcatcttgggtgatgatggtatcgacaattgatatgtctccacccaggtaaccccgacatttggcagtaccacagaagcatttttgaggagcagcaccagatacacgaacataattgtaatcaaatgtcaattcttcaccctatattacaagaacagaacatacccattacacactgacagttgaccagtgtcattatgcattatgtataattcactgggactataaatgaagcaaaccaaccctcactctttctagccctaccttcttgatgctcctcaaagcaaatattccaatgcagacttccccattgaccatccactataaacaataaagaacataatttagcaagctctgcatgagaacacaactatagatcattatatcaagagaaccgaatatattttaatggataaaattaaatggcaataaacatagtagacaatacacgcaaaaatggaagagataaagtcaaccttctctgtgcaacagttagggctgcaggcatgca

SEQ ID NO: 8030 - DNA, 848 bp, Zea mays
cgcctcgaccgagttatctcatctcatctcatctctgggggggcattgcgtatttttcttgaagctttccgcagcacgaaagcagagtcctcccatgtgagagctaaatgatgggggggccatggatggaggcgtccgacagggttcaggccgcgcacgagagcgcatgtgacggagagagatggatccccgacgacgacgacgacgagacgagacgatcagggtgcgattggcgaagcgagaaaagggaaaggattctttcgcccgcctctctctgggcgcggcaggctgctgctggttgatgccgcggagctttgcttgatgctctgcgctgcgcctggccgcctgcgatctcgctccagctgcgcaccacatggcctggggagtggacagtacaccgggggtgcgttggctggctggcccttgccgttgccggtgctctgcgctctgatgatcaccaccagttcggcgaagcgtgcacgttacagcatcgtttagatcgtgtaccgagcggcgagtgatccacgatggttcgaagtgttgggtaggaccagatttggcattatcaccgaccaataagagcgatcggcatctactgctccctagccacatacgacgtgtgttgggtaagctcgcaatcagtcccctgctccaactctcagtctcttcaaggcatgcacaggtgcgcctgctgcgaattcctcgcgtaattagtgacgcagcatctccttaaatggtcacagtcagtgaacggtctcatcaaccctcgcacaagagcattactggctggctggctaacacacactgaacgatgctgtaacgcagtcggccggtggcaagatctgaag

SEQ ID NO: 8031 - DNA, 817 bp, Zea mays
agaggccagcgcaatgagaggattgagcgcctctgcgtctaggttttgctttgtgcacaagcgttcagaaccgaacgacacggcatgcacgctgttcaggtggtcatttcgccgccgagcatgaacagggcgcggctgccatggacatggtcagtctctggcaaaggttacgggtttgctcgctgtacaacaagccgccatttcattccgactagtaagaaaaatattttcatggcgcggctctggctgctcttgttacattactattgctacatcaggacgccaaaaagaagaaaaaaaacaaacagaaaggtgaaaccaggacggccttcttccaaggtggtgcctgggacacaaaacactcccttttttctctctcccgaaaaccgggactcgacgtttacattcaaaactgcgcaaaaaaaaaaaaaaaactgtccattcatggtacttaattggtaaagagatcctctacttgtttgaaaatctaacctagcactgatggtctttgccgttcagcggatcatacctaatcttacagtcagaaagcacctcctcgaatatctatctgcacgttgaagacggtaggattaggaatcggggcgtcagtcgcagcaaattttccacacaaaaaaaaaactatttgagaaaacacgcgtatgcagaacaacagaagcagtgtcccaggcaccaccaggggcacagaaacacatggcaagaggagtcacccacctgttagctagtacaaaacatgccgaccgatggaaccttgggagaaatgaacttcacccagccagagccagccatcagaaggtga

SEQ ID NO: 8032 - DNA, 808 bp, Zea mays
acgacgtgacgtcctctctctcttctggcggtccgggcatttcgtggtcggccgttggggctcagggcgtcgccgtgggctttgaccatggcacggcatgaggcgacacctgccggccatgccgacgactcgccagagcagagcaccaacgcccgcagccgcaggcagcaggcggcagcctttttggtgcggccacctccgcctgacggacccagctgccttgcctatacgatgccaccagccaccccgacctgtctcgtcctcccgttttatttcagctcagctcaacaaaaaagctgctgcctgccaacttgggagcccattcctccgccctttccagttcaggtgcaggttcgttccggctgcgcacgagacacgagccagagccacgctacgctctcacgtgcagtgtctgtcacctcgcaagtcgcaacaccttctaagacaccacagaggtatccgattcgccatctggaaatgcacacgaaacactcgcatcatctactaaaacgcaaagacagactgacggcgggcgggtttcattctcggtcttgaggggtacaacaaatacaaagcacgctactagtacaaaccataggaacaggaaggagccggctcttacacagagacttctgttctgttctgttcttaatgaggtcggtacaatacactacggcaaaacaaataggtaggacgagggcgtaggcggcggcggcgtgacgatcgatctccactccaggcgacagcgcactagtgagcgtgagcgtccaccgtctagtggccgcccgatcgacggttcctcgtcagt

SEQ ID NO: 8033 - DNA, 813 bp, Zea mays
tcagcagcagcagcagcacagcccaggaacggagaaacccagacccagacgtgcgcaccttcttctgctgctacaacaccatcagatggtccagggaatggatcgcagaaaggagcagagagcgcacaccaaaaccaaaaccaaaaccaaaacggaatcattgggcacagcaacggagtcactccagtgcatcctataccgttcttccccggaccgcctttcgtgtacccctggagtccagcatggaacggcattcccgccatggcagcggcggtgtgcgcagccccagcgacagccgaagcagcgatttcatcagaacacggcacagcgagcagcaccgtccagtggaacgtgccaccagcgatcgtgcccgtgctgccgccggggttctgcggcccgatcccagtcccggtaatcccgccgccttccgtctggccactgatcactccctggcccaacgcagcatggagcgcgccgtggctcgggcctagcgctagcgtgccgccggggtcatctcggagcagcggcagcagcacgtgctccgacagcggctgcggctccggctcccccgtcctgggaaagcactcgagggagtcgaggccgcagggcgacgagaaggcggaacgacggtgcctgtggatccccaagacgctccggatcgacgaccctgtcgaggccgccaagagctcgatctggacgacgctcgggatcgagcctggcgaccggggcatgttcaggccgttccagtcgaagcatggacggcagcaggagctgcaagcgtccggcgccgctcgcgccctgcaggcatgcaaa

SEQ ID NO: 8034 - DNA, 924 bp, Zea mays
agtttgcatgcctgcagtggctttcgaagcagacgagcgggaggtcacgctgcgagccttggtcggtctcggcggttttgcgcttgagaaatttggcagtttgagcagagaactgcaaccaaaaagtaaaaaaaaaattactcggttattattacttaattaatcaaatgcgatagcaagcacgctaagcatactcaaggagagagagagatgtgtgtaataagcaaacctgcaaaaatcaaaaggcggtgttattgggacaaggtccaggagcgggtgatcctcgccctgtacatttgctttttgttgatcgttctccttttcttgttgaggattttctgtctggtcactttcttcttgtttcatttcttcagggagttcagtctcggctggtgcagcaagtgcgccaacaaagcaataatgatcagagggatgagagtgcgtaaatgtagacatatccaggaaataaaagttgattattcagaaatctgaaacgaccaaaaaaattgcaaagacaaaaatatgctctctgaaacctgatgtcttttttttttacagccaccacctacgctgtcatagaacaattttgtttgcacatgagccttttacagtggtgtctcatgcgaattaaaatcataggcaaggtaatcctattgttgttcggtgcatagaaacacttttttaatgagaataccactgaacttctattcttttaagggatgcatcagaagttattagtatcataatatagtcagaaaaatgccccaggatgggactgtactgtacatgttcctaaacaataattacgaatctgcaagacgaataagtatagcatcgttatacaaatctcaaacgctaaatactcaccatctcttctgccaaaagcattttggcaactctcacatcaacaggtcgatagagagg

SEQ ID NO: 8035 - DNA, 831 bp, Zea mays
tcagtatgggaattttgtgtgtaagccagacacaagtcgctatgctggtgtgccattgttggttcgacatttatgtgtatttcagtggagctttgcatctcaagttcagttggcgcataaatatgaaccgtgctatttggcgtaatcaaaatagccaacttgtgtggtggcatgcatttctgaaagttgaaaatttgcccccaacataggtcttgtttggtagagctctcaacggctcttatagtagaaatttagaaatgcccatgttcatatgttttcgtttttaacctcttgagctcacctctgttcagatatatgctccctcgtttttaacctcttgaatctcacttctgttcagatacatgctcgacttcattttaccaacctatcgatgtggtaaaatttgttgccgattgtctccagctgacaaaccctggccaaccttttttggacagggatcgtttaaaggtacaatttgtggataaaagttgtcacatgcaatttaactcagtgaccaactaatctgttcctatctacaattttttagcttaagagagccctgcgcggagttcttgttgagactgaacaccagcagggaaagagaagcatctacaggataactgggattactcctattccattgactcaactgaggtacccaccggttcatatctcttccctccttgcctgtttggtctagtaccaagaagacgaacttattcatttccatttcttgtcttcagcttttcttgtaacgaaggccctcagctgactgttgttgagtactttgcacaacggtacaatgtccagctgcgctacactgcttggccc

SEQ ID NO: 8036 - DNA, 868 bp, Zea mays
ttaacttttgtatatatctaagcggcctcttaacccctcgtcatattcggaaaactattcaaccaaaagttagcactgaagcaaaagagcagatttgtttaatcacgaaacgggaattgaagcaaataaaacagctttcagaagtattaataatacaagtatatggaactgtggatggtaaacatctttcagaaatatattaatacagccatatggatgataaacttgcaaatgtgatggactctggttcccaatgaaacaggtacaaaaaaaaaaagttactttgtcgcaagctagtagctcgctggcggaaaaaaaaatagttaatttggtgtattgatgtgtcaaggtcgcaaggagtgatctgctggcaaaaattaggtgcattgatgtgtcaaggtcgcaatgagtgatgtgcagttgagcggtcttatccttgtcatgcatagattttgtattggaaactgtacattatcagaaattatacggcaaatagagatagggatgttttattaaaaaaatgtgcattgaaagaaaagaaaggtttattagaaggtgagaattacaactacttcaagtgtattagaaaggagtattttagaataatatttaaatcttaaaacgtcaactgtttcagaagaaagtagtactactgttattactcggtgcattcatttaacatatccatcacatgaaccgcgcgggacaactgattggatcgcccaactggacaactggttgctccgtccagtgagtttaatgcgttctttaatatgtccctttgaggtttaaatccgaagattggaaatcctgagcgaaaaatcattgctggtcttgggttttttttctttctgagaattattcatat

SEQ ID NO: 8037 - DNA, 907 bp, Zea mays
tattgtttcgattagcctatcatgacaatcaggaatactgattagcattttttaatttttttttcagatgccatgtatctggctgctgcttttgtgttacattgaaataacaactgttatgtgcgtagtttgttctttaaataaatatgtgtgtatgtagttttggcttgataggccatctgtatctttcgcagtcttttccgctactcgtgcattgaagttaaaaaaagaagaaatgtgtaactgtagtcgatactataccgcctccagagtgttgggccctgacactttggcctttgcttgttgaatccaacacagattgcttgctttacctcggccaagcctcaagttcatgcaatactgcatagcgctggaggcgaaccttgcatcgctcggagacaacggcgccctcaaagatgctcggcggctatatgattcagcgctcgacctgtatccccaggaaagagaagtgtggcggagctactacgacctggagctgaaggtgagatcacaaactactactattacgtgtaatatatgctgtggttgccattttgtctggaatcaccgacatgctgctcttgattatgtaaccagatgggaacatcggagtctgccaacgccgtgtactcgcgctctcgtaaggtgctgggtgactccactgccttgactgctccccggggctaggtcgcagcatgcaatgtattccaagatgcaatgtgattttttttgtttggatctgtgttttccaatcctctctgagtctgggtcagcaagcaattaagctgatgcatcgaaattttggctctaaatgggagacctacaatgtgctgctggggaacactgtatatcttgttcaaaaaacaagagtactgcaggtcgactactagagagatcgccgggtgcc

SEQ ID NO: 8038 - DNA, 788 bp, Zea mays
tggtgcctgcgggttcaagaacgtgaacctgccgcccttctccgcgatgacgtcgtgcggaaaccagcccctgttcaaagacggcaagggatgcggctcctgctaccaggtagctagatcaattggtcagacgaagaccctttgatccggtggtgcctgctctgctttaatgcaaaagttctgacttttgactaacgaaccctgtcttgtttccgttcccgccagatacggtgccagaaccaccctgcctgctccggcaacccagagacggtgatcatcactgacatgaactactacccggtcgccaagtaccacttcgacctcagcggcacggcgttcggcgccatggccaagcccggccgcaacgaggagctccgccacgccggcatcattgacatccagttcaagaggtgggtgtcgtcgtcgtcgtcatgcgcaagtgcacatgcaccgcacatttgcgcagagcgccacacaccaggccccacacctgcatatatacaatctagattttgaggacttttgtcggacaccagactaatggaaacatgcatgtcgatcacgcacatgcagagtgccctgcaactaccccgggcagaaggtgacgttccacgtcgaggagggctccaacgccgtctacttggcggtgctggtcgagttcgaggacggcgacggcgacgtggtgcgggtggacctcatggaggccaactccggctactggacgccgatgcgcgagtcctggggatccatctggaggctggacgccaaccataggctgcaggcatgca

SEQ ID NO: 8039 - DNA, 797 bp, Zea mays
tcgtggaggacgacggcggcgatggtatgccgcggtcgaacactgggtgcgccgcgtatttgccgtcgccgagggaggagcactgatggaacgggtggtagttgttgctgccgtgatcttgctgcatccagagaagagcggacgttgaggctgctgtgagctggtggtagctgtcgctggacgccacggctgccgtgcccggggtggtggtggaagcgggcgcaatggagacgttggtcggcgctggtgaggacgtggaggacgaggcgaagctcggcgggtaggggttcgacgcgtgcagcttctgcgcgaaggggcggcggaggtactgcgggagcgtggcgaggctcccggtcccggcggcggtgcgcaaggggaagatgtggtcgaagagagagcgtgcgctcgcggcgccggcgaagggaggggcaggtatgccggtgaactcctgcaccatggcgcggaagttggaggtgtcggtggtgagcaccgtggtgggtgcgcggcgcgacgcccgcgcccgcttcctggacccccgcggcggcgccgctgcggccagctggaccggcgctgcgtcggcctggtaggccgtcatagaaccatggccggacagagacggcggcgaggcctctgcgccggccgggaggggcgccgtcgtcgagcaccagtgggacagcggtggcgtgcggagctcctggaggccgtagatcaaggagccgccgccgaagcccggcacagatggcggcggcggcggctgccggagcagggcggatagcggcgaggagtcggcaccgctt

SEQ ID NO: 8040 - DNA, 793 bp, Zea mays
ctttgaatgagtctcgtattcctactactctcgtggaacgactgctagcagctggaaagaaggagcatcctcctgtatgtgctatccttggtggtattcttggtcaggtaggttctgtactttaacctttgaactgctttgtctgaacttctagtattaattacgtacctccttttcttataaactatgggtctttcatatatttgtcatctgtttgttgtttggttggcaactgaacactggacaacaactaggtaactgtaaatttgagaagtctcttttcctaaaatatggaaccgcctcacttagaaaaaggactgacctcgagcggctgtgattttttcagtcattgacatatagaacttaaggcatcttctgttgatctctgtatgtacttttctggtttctgcctttctggcatgtgtacgggcagaggtctaattagcaaatctgactttagagttaaacaattccaaacaagcttaatttcactgaaagataacaagattagttgaagtgccacaaaatctatcatttttggtgtaactattggtgaaaggcacttaggctggctgattaaaacatacagagtatagaaaatcagcttgaacaagtacataattcatagtcttggatgactcttttgttcgaaagcccaatggactaggacaccatatgggacttttgaaacttgtctgaattttcctgatgagatattagaagcttttggtgttgaatgaatagctttccaaaatagtactcaatttcttcaatttaatgtttaactgcaaaa

SEQ ID NO: 8041 - DNA, 897 bp, Zea mays
tgcctgcagctccgccagccgccgcgactccgccacggcgcgcgtcgccacgaacaggtcgtgcagccgccgcgacgacgacgacgcccgctcgccctccagtgcgggcagcagcagaggctgctccgcgctgcgcaccgtctcctgcgacgccgggtcgcggtacgtgcaccgcaccgacagcgagtgcgggtggctgcccagcggtgtgcgcacctccaccagcagctcgcgctcctcctccgcgtacatctcgcccagccgcacgctcacccccgcaccaccggagactgccacggcctgctgcccgggcccgcacgagtacaccgccgtgatctcccccgtcgggaacgccagctctagctgcacctcttgcatcaccacgctcaccagcccgccaaggcacttggcgaacgcgtgctccacgggaggctcctcctcgcactcggacacaagaggaggtgggtcgccggggccgatggggatctccacgtgggtgaagcgcgttgctggggccacagctggccgcccaaactgcttccttgacgagttttccggcgctgccgactgctgctgctgggtgtcggagagcagcatgacggtggccaccgggttgcggtcccgccggtcctcgagcaccttggtggccttgcgcagcgcgtcgcccacgcacgcgctctgctgcccctgcgtggccgtggccgtggtcgcggcggcggcgcagacgacaaggcggtcgacgatctgccgcgcggaccgctgccccgtcctggtcatccggcgcagcggcagcagacgcttggcggcgccggagaacgcgacgatggagaggcggtcggtggggccgagggaggcgacgacgaggcgcatccctcgcttcagcatctgcaggtcgac

SEQ ID NO: 8042 - DNA, 841 bp, Zea mays
tagagcaatgcttgaccttaaatcccagttaaggggtgtcttgccagaagttatgttgcctgctcaatgaaatgaaatccagacagtttaggtgataccgagtcacagccaattgctgtattcatggtcaaggaagacgattgagatttgagaacaatacattagggcatcaaagaacatattgatcaaatagtacaatttcacaaactacaatgacctcaagtgatcgtcttctttaatcaatccagaatgttatagcagtaaagcagagagcaaaagtaaactataatgaaaatccaagaaaatacaaccaatagtgaccaggtaataaatgatttggaaacttactcaacttgtgggaactagtaagtgaccaattagtgaaaggggaggcatgatggcaaatattttattagagcatccgtgttgacatcaccgaagttaacacacaaagctgagagtcaaaactgaatgcaacttccctagtaatagtgtaatacccagtaaataatcacacataattcaagcgctttggatatcaagcaagataaataacaactcaatcccaactgattttgacttggtctatgtagatcatgacaaaaatcaagtcctattcacaggagagtacgaatattcaaacgaaagaacaatttagagtacctcctaaccaacgtgtattaaacatattggggatgaaatgaagcaatactctacccctaggctaccacccaataacatgcaatgcacatggtacacgtacagcaaaatggtgatgctaatatcataagcagataatatgcaaccgatacttgggggacgggggattaagatctcaccg

SEQ ID NO: 8043 - DNA, 770 bp, Zea mays
cggtgagatcttaaccccccaccccccaggtttctgttgcatattatctgtttatgctagtagcatcaccattttgctgtacgtgtgcttgtgagtaccatgtgcattgcatgttcttgggtggtaggggtagagtattgcttcattttctaatgtttaaggctcgtgttggttagaaggtactccaaattgtttttccgttttaataatacccgtactctctactctcctgtgaataggacttgatttctttgtcatggtctaaggagaccaagtcaaaatcagtgggatcgaggtgttatttatcttgcttggtatccaaagcacttgaattatatgtgattatttactgggtattacactattactaggaaagttttattcagttctgactcagatttatgtgttaactttgtcgatgtcaacatggaacctctaataaaatatttgttatcatgcctcccttttcactaattggtcgcttactagttctgagaaactttccgaatcattgattactcggtcatcattggttgtatgttcttggatttttcattttagttatctttgccctctgctttactggtagaatattctggtttgattaaagaagaaaatcagttggggtcattgtagcttgtgaaatggtactatacgatcaagttgttctttgatcccctaatgttttgttctcaatcgtctttgctgaccatgaatacagcaattggtcgtgacttggcctcacttaaacctgtctgcatctcattttt

SEQ ID NO: 8044 - DNA, 854 bp, Zea mays; identical to SEQ ID NO: 4370

SEQ ID NO: 8045 - DNA, 827 bp, Zea mays
ccattttgcatgcctgcagagttctgtggtgtgcctgcatttttccaaaccccagcagatcgctgatttgccccggaaggaatagcttggtccttcaaatcatgtgcaataaatggcttcaaacaattctgacagcgcaaagctttcttcaagatcgagaggtaatactgatatctcatgccacaagctggacaaatagtccaaaatgttgtttgcgtccctgtaggatttgaggcttgacgctgatgttgctgatgcatattgtagagattcacaggagtagaactagatctagcaggtgcaggtctttttggtggctggcgattgggtcttgctgtaacgcttctgaaggtgtttcttttcatgtcatgcacataacgttttgatgggtctgtgagagttatgtttgcttctccaactaatttgaatgctgcctccgcacctccaaatttgttcttgtcagggtgtagcaaaagggcaagcttacgatactgcttctttatcagtgcgtcgtcagcatttacaggtacttgcagtattccgtaccaatcaatctcagtatttaccttagctccagcagcacaatgaacatcacaaacagttaacatttttggaatgtcaatatcttccacttctttgaggagttgctgcaccttgataatcaacttttttgcaccaacaaaatccttgtccagcatttttctttccgcaagaactttcgctctagcagcctcatctctgttgcactccatgtaaacaagaagagaagctggtatcgttgcagaaatgttagattacctagtggctagcacaatatattagtaacc

SEQ ID NO: 8046 - DNA, 828 bp, Zea mays
aggccgagcccgccatcgtcgccgccaccggcaccgggaccatcccggcaaacttctcctcgctcgccgtctccctccgctccgccgccggcgcgtcccacccgtcctccgcctcccgcgccgtcgccttccaccacctcccgccgccgcagcacgaggtcgccgccatgctcggctggaaccaccatcacccacaccagcatcagcagcagcagcagcagcagctcctcccaccgcctccgcagcagcaggcgccgcaagatcccggcgccggggagttcatgaggaagcgctacagggagggcgacgacgacctgttcaaggaccccgcggcgcgccagcatcatcccgacggcggcgacgacgccgaggaacacaaggcccgcgtcacgccagccaccgcaatgtgggccgtggcgcccaacagcgccggcgctggcgccttctggatgcagcccacgtgggcgttcggcggcggcgggagcacggtgcaggcgccgctccagttcatgtcaacaagaagcgccaacaacttccccgccgggacgacaatggacgccaacatcggcatgctcgccgcgctcaacgccagcggcggcgtccagcagcagcaggacgaggggcagacgcgggagatggcccagcgccaccgcggggcgaacggcggcgacgccggacgtggcgcagcgagcccccagtaaggatggaatcggtcgcatgatgaggtagctagcattgcagtgcaaggtgtgcgccgctgccgctggtgcagcaggcatttggcggcgattagggcagagttagtggcttgattaggtgattgtttct

SEQ ID NO: 8047 - DNA, 877 bp, Zea mays
catcaagaaataaacgcagagattatcccaagcaagagtgagcagaagttgcagagtactaactattctaaaattttattatgtaggccattacattaagtaccagacttcattttgccttaaggtgtttaacttctggtgaaacccataacagcacctctaccagcaaggatacaacgtcctaagttacttttccatcacatagggataacttttaggattctaacctgtattcaggtttcagccacttctcgccctcatccaaaagccaggtaatcttctcacaggtggtcattatctctcctaatgaagcatcaaccatagtctttccagtgtcccgagatgataccctgcacagcataaacagaattgagctcacccttccagatgtcaggacgtgtgaagaagttttataaaagttgggaccttactcgcatatgagatcctgatgttcaagtatatacttgagaaggattcgaagaaactggcgcctttgcttgaagctgctttttgcccatatcctttgagctttcctggattgtgcaacatgttccttgacctgattacccagagaattgaattgaccatgatgaaacccacatgaagaacacattaatgaagttcaacatgttgcgagaacactacatcggttcctcaactattcactggttaaatcaacaaggggtgcactaaacctctagataatggcagaaatgacgatgcatgacgagagagaccttaaactaaaagaaaaaaaaacaaggcagcagcatacctcatcaggagtcaccactgggaagtaccccaagtatttcatggtcgctggttcatagcattggaccttgtcagtctgagttgatttaccccttctcggtat

SEQ ID NO: 8048 - DNA, 787 bp, Zea mays
atcacatggccattgacgacgacgagcaaactgctccgcaccaaggcaaggatccgtagtctccagtccccaccaccactgtcgtagtagcgtcttcgcaagattcacttgtcggttgaactaataatgacactgtgctcttcaattgctgccgtattgcagtggacgacgacgacgagcaagatcttgagccaccgacaaaaggtgcacgaacacctctgccaatttcgtccctatttcccccctccgtattctcttccatttcttcactgttgtgttcttccctccggactgcatcaccgcaaatgtagcagggattaagcccacgctgtcggtggaagaagagagagcgaccaacccagagccggtgaagccgccgcctccaggtgaattccagatcacttcgccgttttttgcgttttttttttggctgcgatggattagatagtagatatatatggccgccgcgaatactgtcttaattttctgttcgtggatggtccagggaagaaactagcctcggtggtcgatctccgagcggtcaatccggaacccatgacccctgctcctccgccaggtgaatttctatattccatcaaatgcagaactcacgctaattcgggtcacatcacttgctgctccgaaacgcagtcgagaagaaggcgacaccgatagtggttcaccgcatgaccaacttcgagctggcacaatcttttccaggtaacttcgattctaaaaaaatatatcagcctagatggaattttagcatcaccctgttggggaagtt

SEQ ID NO: 8049 - DNA, 875 bp, Zea mays
cttgcatgcctgcagtgatggtcaaagccatcaacacatttgtcacatactctacaatgcttactgttcttcaaaacctgtgcacgaaatccaaatcaaaaggtgaagaattatgctagtacttcataaaatgttagatataatgaagacactaatcaagatcccaaatgtatcagaagactgactttcaattcagctataacagttgaatcagaaattcagagcacaattagataaatgtctaaatgactttatttgattcaaatcactagccttgcttatctggattcagtatagtttgctacagtaattcctgaatttcatgggtttccctcataatacatccacatattggttagtttgtcaaagctatattgattactgaatagcaaactgaatattagcaaaatttgaagtacaaccatgagcatgccacctacctgcgatctacacaagcacatgccaagctaaagcataaacagctggaagatgtaaaattcactgtaaaagttttactaaatttctggatattcgcttggctttaatttgtatcggcttatacaacttctacagtatttttgtttctatgaattgcagctacagcgatccaaacagccggctttaatccgaagcgaacagcccagaccagtatagcttgaagaaacaggacaagtatgttcaggtatgagtattcatgtgcaacgcatgagcatcagcaacagctagcagatagaaccatcagggaaaaaaactgataccgtgctatcactagcacttgtttgtattgaatagccccaagagcaatacatggagtacatgagtgcagtacaaggaataggaaaaggactcgttaacaatacctctgcttcgcataa

SEQ ID NO: 8050 - DNA, 872 bp, Zea mays
aatccatcaatacatactacattgagatcttgacgacccagagaaaagaaaatctccctgtcatcaaaatccatgggcaacagaacaccaacctcatcagctttgccaaaccattgtaccttgaccatgttgcaggaatttgtatcctcatagagatcttccacataagcaataagtctcttcatctcttcacccataatgtatacaaaactatgcacctataagtacagcagagatgtatcagctaaggttcaaccttcaaaacttcaatctacacgaaactagtattagtactcgttcttcatctacttttaattttgtattttatgaagccaaaatgttctttaatatcatctccaagtacgaatgatgaaaaaaaattgtctaagtaaaagaagcctgtcttcaacaaaatatatacacttctatctcatgaaaatgtccaaataatattcaggtgctccaattcattgtcttctccagtggcttggtttcatgtctgcctaagtatggtgtttgaaaagtaaatattatacttgattgacagagcaaggagtagaggtgcacatgattaaaaagacaatggaagtagccagtgacagcgaatgggcataccgagatagtaattcctctacggcagaaagatttgtagtgcttcaaacttcgttggcatttccatgaagctcccaaccatgtgaagtcattcgaagcttccctagaagaaacatcctgagcaggcgtaatagaaaatgcattagagaagaagaattatcaatggtgcttccaagacaagacaagatgaatagcaaaatgtttctgtaccttcgaaacggtaacttgactgcaggtcgactactacaaaatcggcgggt

SEQ ID NO: 8051 - DNA, 842 bp, Zea mays
tcccattgaacagttttgcgccgcaaaatgtgatccaagcctgccgatggggaaaagaggttggtttgtggtttaggaagggtttgcgagttgcgaacacgcactgcctgttcgttcctaggctgtttcggctctttcgctggtcggtgcaccattctgggttctgcatagaaatttcgacaagttattttaggatgctgtccttgtccaggtcctccaggataccaattgaattgggctcagatttcacgtcattttaggatgttgtccaggataccaattgggctcggatttcacgcaatttaggacccctagcgacttagtggcagaattgctgtccgtcagcagtgacacgggtgttgcttctgaatactccactgttcctaatatttattgagtatgtgtctgaacccaaatgcccttcttattcccagcagcttactcatccctataactttatcttttattttaaacttagcaatataaacagtatactagtatagtctacattgtaaaacaatgttttgtatgaccatatatacacgatctgctagtcatattgtcatagccatatagacactaccttcttttttttctcatgttattctgccatggacttaattcctggaggcgagtctcagttggacaaaaggtataaatttaatggaaaaatcttacattgaagtattgaacccagctgtgcacagtctactacatacaatttacacagaagcccttttctgttcagtacaggccaaactggccggaatacaaaaaatgaagtcaaacttcctagaaataaacaaaggctaagtatacactctttctcgtcactttacatt

SEQ ID NO: 8052 - DNA, 833 bp, Zea mays
agcttgcatgcctgcagcagacgacggagcacgcagacaccaaggagcggccgctgctgcggttcgggctaggaacacgcggacgccaaggggcggccgccgctgtggctcacctgtttggctgctcggctggcagcttttctagcctcgcgttgtcgtgatcagggtggaacgaccatcgggcatgaaggcttctgtctacgcgggtcgactcggcggcgccttaactttggtggtgctgatagtgactaattttggtgttgacagtgacggcgcaacatgaaccagccgtgcggcgcggtacacctgcaccatggatctgtctcgttcgctgattatattcccctccaatgatcttccattcttcccagaacttttaggccacggatgacgaccagtccaattaatcagtaacaaaaaaaaggttcagaagcgacagtgttaagaatccagaagagaatcagatgtattgttcagaataaatacactaccaaaacctcctgaatcaaccagcgtatgactaccagatttttgggacaagcaaacatatatataggctcaatccgaagagtcattaaacaaagcatcaagagcggcagcacacaaaccgctgggttgcacatgatcacgaacacgcatcacgggaaacgattcattttcatacatattttactgcctgcacactgaaccatcgtcgacatgaaggtgtttaccagctgcccgtccagaaggggcataatttatatcagttctattctatgtgtgtaagaaagaagtggcccagagcaacatacgtcaaaattactacacgatacatctggtagtatcccctt

SEQ ID NO: 8053 - DNA, 878 bp, Zea mays
cttgcatgcctgcagttttgcattctgcacagcagtacccatttgtttggatgctgctactgctttttgcttggatgctgatctgctctaggtagcagactagcaggtactctattgtttcacttatgctgcattcactggtttcacttatatatagctcattcactggtttcacttatgttgcattgctgctagcctgctactgttatatttcagtaattcagttccaaacttccaatttaatttcagttctatatggcttatatgcctagaaatacatatatatatatatatatatatatatatatatatatatatatatatatatatatatatatatggcttatatgcctaggaatatacataggacgactagggacgaccagaggccgaccagaaccgattagtcgacctaatcgtcgccctaatcgcgattgggcgcctggtcggtcctgccggtcgactagctggtcgcccgacttgaaatcagtgatcaccacagctatcagcaagttagtactcttctaaagatgtgtatagaaaatagagatattcttgttagttccttgacttgtactttaagctgctaattgttttctgtaatctggcacatggttgttgtcgggtcgctactgtataatatggacctgtgacgagcctagtttgtcatccacatttacataattttacaagactatcacaccaaaaggcatgtgtgcaatgtgttctacttttacaagcaaactttttatttcttgtgtgatatacatcagcactacatgcttactatgtgaagtgggtacgtataagtaacacgatgtttgtaatgtcacagtatctaatatttggtagtactataagcaacatcaattggctgc

SEQ ID NO: 8054 - DNA, 835 bp, Zea mays
ggatcctctctagtcgacctgcagctaaagaaacactgaacttggcatgttcgttactacgcagtaagtcataaatgttttatttgatgcacctagggctggtaatgggctataaattttacactataaagtttaaggatcgaatcggattaggatcgagctctatttgtattcatttttgaactaaaattaattaatggctcaaacaaattatgaagaaccatttggatcgagatccattaccacccctagattcacctgtgtgaaaatatgctcctcactgctgctatttttttgatattatattgtaagcaaaatcaggggatggaagaccatggctgtatgctgtcgagagcagtccatttgaatcccccgatgttattttccttgagctgcatgcttctgcaatgctctgcctaccttctggagaatgtctgttaccagatgcaacatcatgcacagctttgacaagtgcactatattcaactgtcagtgaagatgatgtgctgcatcgcctgttgaaggtttggtccttttgctcgaagaaattttttttttttggttttgaaaacaaattttgttacgtctggcttgttacatgtaagtcaatcaaaatagttatagtccctagtaagaactgttcacagcacaccagcttcaatatattttagtagacttgtgcaaattctaaatgtgtattatctattgagcaaatgggcaggtggatgtccaggtctcttctagagacccctgctgtattgaagttgctcttcgctgcttagcagcagaaggtgatggatatgggcttcatgaagccaacgatggaggtcttctt

SEQ ID NO: 8055 - DNA, 834 bp, Zea mays
cttgcatgcctgcagactgtttcatctcttccaggcaactcaccagctgagactgagaccggcacaagatggcggctctgaccaggtattagaggcaagccataggtcatccatgatgaatgatcaccttatatgaagctcacatttctcaatggcattccattcttgcacaatcattccagccagccaccatagctccatgtcgtcgtcgacctcacaaatggcgtcgctcgccgtgctcgtcttcctggtggtctgcgcaacgcttgcgtccggcgccgccagcgtccgcgttgggctcacgcgcatccactccgacccggacaccaccgcgccccagttcgtgcgcgacgcgctgcgccgcgacatgcaccggcagcggtcccggtcgttcggccgcgaccgcgaccgcgagctcgcggagtccgacgggcgcaccagcaccacggtgtccgcgcgcacccgcaaggacctgcccaacggcggggagtacctcatgacgctggccatcggcacgccgccgctgccgtacgcggccgtcgccgacacgggcagcgacctcatctggacgcagtgcgcgccctgcggcacccagtgcttcgagcagccggcgccgctgtacaacccagcgagctcgaccacgttcagcgtgctcccgtgcaacagctccctgagcatgtgcgcgggggcgctggcgggggccgcgccgccgcccgggtgcgcctgcatgtacaaccagacgtacggcaccgggtggacggcgggcgtgcagggctccgagaccttcaccttcggctcgtccgccgccgaccaggcccgcgtccccggcgtcgc

SEQ ID NO: 8056 - DNA, 851 bp, Zea mays
gcgggcacaaagccgaaacaccccaggaccaagggccaaggcagcggctgctagcgcctatcgggaacacatgccggaccgtggaagcaataggaaatgcatagcagagattgatgcgcacgacgcacacggcacacgcatgcaagcacacataggaggacggaaggacagaaggcgcgctgccctcgggaattgtgtgctctgatccactctgccgccggtccacccttttctttccccgttaatgccgcaataatagcagacataccaaaaggagagcggagccggagccggagccggagccggcgccggcgccaccgccggcactccactgtattacagtgtgatgtaaggtagccgcccatagccccggcccccgccggcccgtggccgtgcacccggtgatgaaccaacggacggaagaaaaataaagagagaaaaaacaacttaagctgatttttaataggttttctaatctttgttagagctgagcattatggactatggagatgctggtgagcccaaatcaatggttggagaagctcgttgctttaccgggagaagacgcggccgcagtcgcaggagtggccgcgggtgccgcaggtcttgaggtgggccttgtagtcggagtggacggcgtaggccttggagcagcgggcgcaggcccactggcgctggccgctgtgcttgcggcggaagtgcttcttgatgccgacgaggtcgcccagcgcgtgggaggggttgtggtgcaggcagctgggctccgggcacacgaacacccgcttccgcgccgcctccccggcctcccgcttcagcagcttccacggcaccttgtgccgccgccgatgcat

SEQ ID NO: 8057 - DNA, 845 bp, Zea mays
atcctctagagtcgactctgcagcaagcagtgaaaaggatcaggaaaagtatatgccacaatgtatagtgacagattggttcaggcagaactgcattattcgtcagttgctcagccaaaaactaggactaaaagcaatcaatatccattcaagtgatggcccaggcaacatcatttcctacttcaagcattaacagtaacatacctcaatgcacttctcccgtgactttgaagaaaataaggaaataacatcatccatgagagaacgcaggtcaaaaggcaccgcttcaagctctaactttccagcttcaatctttgctcgatcaaggacatcatttatcaacgttatcaatgctctgccacacatttgagcagtttgagcataatccttctgtgtcatagttagatctgttcctaaaagcatatccagcattcctacgccagaaggaaaaaaaattagattgccaggcccacggaactgaagattaagtaatatcaaaataaatgcataagtaccaaggacaccattcataggtgttctgatctcatgtgacacagttgccaggaactgcaagagagacaaacatacataagctaagccatacatgatgcatatgctagaatgcctagtaaatgagagtgctaaagaacaggccaaacctgagactttgcaacatcagcagcttctgcctgcgtttttagctcttccatctttctacaatcttctgtaactttgtcatatcgagaatatgcagcggcaatgctataccccagaagcatccatatgacaaatgtgcccaaaggattggttatggcagaccactgcataggaagcttttgtctata

SEQ ID NO: 8058 - DNA, 757 bp, Zea mays
cagccaaaagcttccatttgcattgcgatgggggctctacctcgtggcctgctagctggcatctgcgccgtcttgttagcagcagtggttgcccttgcccatggtgcggaacaggaaacagcgtcaatggtggtcggcttggccaagtgcgccgactgcaccaggaagaacatgaaagctgatgcggcattcaacggtgcgcgggctgctataatttatccaaccatttgcaatttgcattttgctgggcaaaccatttgcaatttaccggtctatctcttgtttttttgtcccttcaggccttcaagtggctgtcaagtgcaagaacgccgacggcgtcttcgagaccaaggccctcggtgaggttgacaagtccggcagcttcagcgttcccctcccggctgacctcctccgcgaggacggcgagctgaagcaagactgcttcgcgcagctccacagcgcggccaacaagccatgccccggacaggagccgtcttggatcgtccggccaaccaccgacaacgacgacgacgataagatgaagaataccttcgtcgcagtcgccggcaaggtgcactacccatcaaaggagtgcgcctctgctttcctcttctaccatttgttcaagaagcacctgttgcacaagaagcccatggtgatcatccctcacatccacaagaagcccatggtgccgatgtaccgccactcgcccgtgccggagtacaagccacctcacccgacgcccaccccgatctac

SEQ ID NO: 8059 - DNA, 867 bp, Zea mays
taggctctgaaaattcacaaaagaaaaccaacttcggccatcagaattttggaagatatccagaacaccaaaatcgaaggtgaagaacagttcaaatcagtatgtaaataatactccctccgtcccaaaatattagtcgttttagcccttgaattttgtctattcaaatggatgacaatgaatctagacatattatattatatatatatatatatataacacatacattgagtattatatggatctattaaaatgctaaaatgactaatattttgggatggatggagtatctacttttagcatagttcatgggctcatggacagaaaaaaattcactgtgcatgaaggacacccaaagcatgaccttgtagcagcgaataagtgtgtactcataatatcttgtcttcttcacttctttcgaaacttctactgctagctccttttctgtcagctgcctaatccgataactgaagtgtgcataaaaaacatgcataagtgacttgggaagaaacaaatccaaccaaggtatataacaaaaattaactgcaacataccttggaataacgtccttaaacacagcaagcaaagacatcacaccaagtttaacaaccttttggtctctgtcattgcttatacttagcatatcattcagagatctaatgttcgactcaggatcttcaagcatagacatccccagttcagcaagttgagccttctttttttcgaataattcctcagctgaaagttcctccttcacttcctcctgccatgtgtcatgcatagtaaaaaggtatgtgagggaattaattttgattagaaaatgtagagattatggtaaatcagtagaacattcccagactaaaactt

SEQ ID NO: 8060 - DNA, 801 bp, Zea mays
tctccctcctctcgccctactcccaggcacgtgtgccagcttgcccagcttcggttatctcgtctttgttctttgatgtgtgctttgctcgtagatatatatatgcagtatggttggttaattttctccggtaatttccatggcctgatcgatctttgatttatatgtgcccagactcttgggatctcgcacagctacgtgtccctgacatggatctgcgggcctatcgctggatttgtggtacgtgcatttttttccttgttcttttaaacctcttctcttatgctatttggatgaagattaagaacgtcaaaatattgtcacctagcattgaggttttactttaccaaaagatctatcttcaagggataagaaaaattattaaccagatttatttgcaaaggataagataagatagaattcggaattaatcaccaagagaaagagatgcgtttccgtacgtgcatcttgcatgcttctccttttccgagggaggccggccggggatattgatgtggctattggattggcttcgttggcaggtgcaacccatcgtgggctactacagcgaccggtgcacctcgaagatgggccggaggaggcccttcatcctcgctggatgcatcatcatctgcctctctgtaagcccacatagcattctgaaactagcattctttttgtttttttttccaaaagaaaaaaaagaatctgattggtcggtcgatgctggtggtccggcaaaggtgctgatgatcggtttctcggcggacatcgggcggcgcctaggcgacaccacggagc

SEQ ID NO: 8061 - DNA, 825 bp, Zea mays
aaactctgaaaactacaaccatatggttgaccaaacaaaatctgtacttttgccatagacgcatcaaatgtgtacttccctggtacattgtcacagttacataaatatttagttttgtgatacaatgacacattaaatctgtagttttgaggcagataacaacaccacgtagacttcttatgagctttacacataactgttattttgtaatatcacaattagagacccatatgaaaaaattgtgctcattggctatttgcaaagtgcatccatagtgatcaatgcagacaaaaaggaaaaaaggcatgccatcagcaagacaatgtttaaaactttttgcttaatactcgtggtatttataccagcgcaaagtttcaggttttcagtcacatgcctgctatagtatttagcatgcatctccaaagatgacgatggcttagacagaacaattactagaccaaaactcaacagacacttgatgaaagtaaaaactgttagaatcccgttaggtttttgtcagtccctgtgtaattacatgtttacccctctgtgtaatgggcttggcccaactacttggattatataattgcactcccaaccctgattagggttagggtttccattctccaactataacttcatcaaaatgatagatatgaagggggcaaatcaccttgaggacacacaatcacccaatatgacataattggagggagcttgtggccgccagaacctttaggttgaaaccaggtaggtcaccttgcaggtcgacttttagaagaatcccccgggtaccccgagctcgaattatgttaatacatgtta

SEQ ID NO: 8062 - DNA, 746 bp, Zea mays
gttcctaagaacaaggtttggatgtgttcagctgtcatctccacatcctgtcatatgctataaatgaaagtggcctggcagaaaattcaataatttcttgtcgctaaaattgcagtaacaagagtatatgaacaaaatttaaagaacatcttcgcattagacggatcatggttccatggctagtctttcaggttccaacgagtggggatagtcactcttccctcttccagaagataaaaccccaatcccactcccacccgcaccccaaaaaaaacccaaaaaaaatattactatgattaaggataaagccactgcatgcactgacgggcaccagtttagcgtataaacatcaatatctttgcagctactgctaatcgcactcagatttggtggccccgtcagagtatgccatgtttactttcttatcttcaaagcttgacttagcctgttcacagttgttggactccccattttttacttcagcaagtgcttgcaacaatgatgatgtatgctcaaggattgtgcgaagtttagattcatccattgtgttcaagtctgccatgttaaaatcagggataaccttttgtgtgggtgcactggatggatcatgttcttcagttgtctccatcacatttgagtttaccttgtttgtatctatttcatatggtttctctgtttgtaccttgataacaacactaggacacactgcaattctgttaacctccactgggccgtcgtctattggt

SEQ ID NO: 8063 - DNA, 784 bp, Zea mays
tgctcttcctgaacggcaaccgccttaccggagagctaccgaacgtcagcatgccgtcgctcaccacgctaaacgtctccttcaacaacctcagcggcgagatacccaagagcttcggcggcatgccgtccacgtctttcctcggcatgccgttgtgcggcaagcccctcccgccgtgccgagcgccgggttcggaagcatcgccgtctcagcctcccactcccacgcttcggcccgaggcaccggccccgactgacaaccgcggacggggcaggcatcacctcgccggcggcgccatcgctggcattgtggttggctgcgcgtttggcttcctcctgatcgcggccgtcctcgtcctcgtgtgtggcgcgctgcggcgggagccgagaccgacataccgcagccgtgacgccgttgcggcggagctggccctgcacagcaaagaggcaatgagccccaacggctacaccccacgtgtctcagacgcgcgaccgccgcccccgccttcagtcccgccaccgccagccgtctccgccgcagccgtggggcggaagaagctcttcttcttcggtaggattccccggccctacgacctcgaggacctgctccgcgcgtccgccgaggttcttggcaagggcacgcacgggaccacgtacaaggccgcgatcgagtctgggccggtcatggcggtgaagcgcctcaaggagacctcgttgcccgaacgcgagttccgggacaaggtcgcggccatcggcgggatcgaccacccaaatgtcgtgccccg

SEQ ID NO: 8064 - DNA, 809 bp, Zea mays
cttgcatgcctgcaggcatgccaagattgtgcttggatcattggatgtactaagcatcagggtgctatgacaaaacatgacagtcttgtgatcacatcgcaacataccaggggtattggtcagttttagcaaagcaaacttgtatgatacaaacgataaaaaaaaatatgccataagcaagtgcttccattacaaaaccgagttttgagtggagcgtttacgtcagtactcagcattgcattgcaacaagtaacataaattctatgcacaatcaagtggtaattccatggacatcatacctatttatagcacgatgctccagctcaacatcaattttcctccagtctttccctttctcctgcaacaccacttctcttggcttggcatcaccaaatgggttaacctttggccgtgcccttggtgctccttcgctcccaacggccgaaacctgtgacccagggctgccagggcgggaggaatgagcactattcggcctgctggagtgcgaactggtagggcggctggtcttctggtcaatctcattctcaaacttcttccaatccacccccttctcagccagcacatcctcccggggccttgcagccccaaaagggcttggccggttgcgagccacctcagcaggtggggtagaggcagttgacgggtcacgtttaggtggattaaggacgatgcgtggcctctcccccgccccctggccgttgtgtggcataggggtggctccacggacccaacggtcagcgtcagaagaagctgatgagtcgcggaagcccggcgagtcacggaagcca

SEQ ID NO: 8065 - DNA, 816 bp, Zea mays
tgcgcttgccgcttctgccatggcaagatagcacgaagtgaaaattcagatggatacagcaaagctctttcagttgcagaagttgttaacactagcataacaaacttcaggttgtcaaatacatatgtttcagtattaatttataaaaaaaaaatagctactcaacagagatagcacaacagcaaatttgcaatggttctagagctactgtaaagatttcagatgaaagtgcttacgtacaatacaagaaagcacattgagcaaatagccagttaatacctgctgctctaccaagggtgtccagagattttgctttaagcagtatggcctctagaagcaagcttacagaatgcatggacatatgcataagcattccgttcacttgtgaagattttcgtcttgaagagcgtgggggcattctaggcttgacactttcagcaatagcagtggtcattcgtggtctcagacttcttatatcaatcccctgaagaacttgcaatgctgcatcaaagttccctctctgatgttccagtctacctaacaatgctcgagcctcctattacatagcaaataaatcatacagtgagcagatctttgcaatacagcttaacttgtttgaagagcagaagtgttgagccaaacctcataatttagtgaaagggtttcttttaggtctgattctacttcatttacttggctgtcatcaggagttgtttctcgacttgccatctttgaagaagagcaattcgctgaaaagtcacgtgttgcaagagattctggcgatctaggaagatcttcaaacttggactggtcccc

SEQ ID NO: 8066 - DNA, 823 bp, Zea mays
gctgactgtttgagggcttttgcaattgctatagtacccttgttctcaagattgagatcactgagataaagctcaacaagatcaggtagttttggaagggtttcgctgagagctaaccctgcatcaacaccaaacaagttgtccctaagatcaagtttcttcagacgagtgcatgtccccaatgcctcagacaatgcgactccaccatcagatcctatccttgttgctgagcacctgaaactctctacatttggagaacgcttaaccatttcagcaatatacatagcaccttcatctccagtcatattgttgtggaagtgaagaaccttaagcttctcagttgcaggaataagctcagatagagcttttgcagcttcctctgatatgccatcattcatcacataaagttcttccagggattcttgtgatttcaggagctcactgaatgccctgacacccttctcgcccaaagcattgtcagagatgttcagatatctcaggacagaaccatctaatgctttggagaatatgcgcatcacatcaagggcttcatcctcagaccttcctgccacaaaatctgagatatcaacctctgtgagctgattcttaactgactcaagaattggcccagcaacattagcagcaccaataccaaagctcctgttgctaaagcaaattcttttatatgaatttcctggtttggtaagtggactcagcagttcctttgcttcatctgcctcaataaaagcacgcttgccaccagatatatctagtacagtatcagcagacacaagaggtgtgtcagctacaggtgcctccagtt

SEQ ID NO: 8067 - DNA, 819 bp, Zea mays
gtgatgtcatgatgcatttatgcttcttaattcttgacaaaatagaaatgaacaagtgattggctcgatttaccaaaacaagacagtctgttaatgcatcatgtgtaattaaagcaccatcaacccccaattatattgacatattgttgtcagtactttatcagcattgcttcacagcctttaactgtaaaacaaaaccctcatccaattgtacaaactctatgttaagtatgtaatgttaagtgacccttatgtttacaatgttacaccataaaggttctaggacatgaataagaggactgaattagttcccaatcagttctttgatatgaagtcatgtattactaggccactatgttacttacatagttctgttagtatcttctatgttaggaggccttttgtatgtaatgtaagaggttgttcaattagcacctccagtgacaagctgaaattaaaagatcgtatctcttcaattatcatagttctgactgcgtggacacaagacaaagaaatcggtggatagaacagcaccatccatcacccattaaatgccacaaaaatcaggttcatggtcccacaattcaactgacaacagtaatatttctaaactacagatttagtttgtatggtcatgctgtcaaacattggttacaactttacatttctcaagtccccgcaataacgacatctatttactcagttccctactaattaagactgaaccatcttcagatgaaatagtagcttgtgaataaatttggaagcattgtcaagtggcaacaatctcacctgaaacatcatgtttctttcctctaa

SEQ ID NO: 8068 - DNA, 825 bp, Zea mays
tggtggtgcaaagcgtcgtcgttccagccgtcgtgttctgggatggcgtgatcccaggaaaatactcttcgcctttgcagcattgtaagtaaccagcagccatactctgaccatgcggtgtgccctgtgcatcatacaagacattttttcttttcaaattctaggtttagttttcctgtcatcttcaacctacatgattaaagtagcaaaagggcccgttgcacgtcaatcatgtgtgttgccttgtatgtgtcacgaccagctgttagaaaccttgttgctttcttccttttcttttgataaaagctcaatagttatcttaagagcatcaagattcaggcagaacatttccgttccatgtgcgatagattgccggaatttacggtaaattgtacatggtgtaaggaactttttcgaaattttatgcttctgctgttgattttgtactgatctggacactactagtctttagtatatagtactagtacacgaatataaaattgtttacataaattcagccccccccccacccaaaaaaaaacactgatgcaatattaaaaacgaggaaataggtaccagaattgttgcctgctgttttatgaattcggtatgtcccagttcatgttagagcaggttaatgtactgctactttgtcaacagaagtatagctgcgaatgttcagcctcaagtcttgttggatgaaaccggaacgctctgccaatgtagggccctaaccgcggtttggtttctaatcctagcaagacaaggaccgtttcagggtctgaatttgtccttttgtttttcttttttgggctgcaggcatgc

SEQ ID NO: 8069 - DNA, 851 bp, Zea mays
gcgccgtatgtttcttgtcactagtactagtagtcgagcatacttttttatattttttgagaactagtgagcatacttttcagtgcctcttttggttccgtttcagagcatacttgtcaccagtgaaaactgttctcctaggaggtaggactaccgttttctttttccttgtcaagataatactacaatgtatcaattatcggtaccaactttctgtaaaagctaaattttcctccatcatcaatcaaaacataataattcatcaaggaacgtaagtaggagaccgatggatcggccaacgaacgattttcacccagggggcgccatccgtgaactaatcccagccgtccatccgtgatctcttgcgccgccgccacgtggggcattcctgggccgtctcctctcctgtgtgtctccacccaagcggctttcccgtccagtccaacatgctaccggcacacagaagcgcgcacgccgggtcggcgggggcaagggaaggcccacatgtcatagccggttcccctcagctcccgcccgccgcgccgtggaccaaccgagttcacccgcgagatccgcctcggcctccgcgctccaggtatggtaaccgtacaggcccatttattaattaagaataacccccattttattttagttaactactacgcgttaatccccgaattaacacctgaccactgaactgtaggggttggagggatgggcaattgaccatgacggtttgatggctcgtggcttggcttcagagagacgggtgccacgtggatgggagtggtgggtcatgcatataaccacctctttggcttggctcccgccgaacgtggagaggagcggct

SEQ ID NO: 8070 - DNA, 796 bp, Zea mays
aacataattatacatatatttcacctatatatacatataaatatttatacacataaatatatatatatatatatatatatatatatatatatatatatatatctaatgcgtgcacacgggtacaactttttcgtacccacgagaaaaaaaacggtcgggttgagaatcaaacccgcacccgtgtacccacacccaaatccgcaccctatagggtttttacccacgtgcacgcgagtaaaatgtggccattgtcacccctactcatctatcccacaccaaagcacatgtatgaagtgatccggccaaggtcatgattctcatatgggctaatgcaccactatttgtgggtggacaagggttcaagagttccattgacctacatgaagtcttcttagcaaaatgtttaggtgatgtcttaccccttgcaggtaagcttttgtgggattgttggcactacatgtaaattaggatagtcctctgtgctgatgcctcaagtgttaacgcatagttgcagcactacccaaacaatgtactctatctaacacagaaccaagtccttgttctctgtatagatatgttcactgccaacatttagcattgcctagagccaacatttatatgcaccaactatgacaactcaaccaaagggtggaaggtcttttgcctttttcctacaatcaacagtggggccaagtgaaaataaacaaaagatggttttaaattttgtccaatcttctttagaataaaaaaaatgtagcaaaggcaatacctggactcgttcctctgaactgaactt

SEQ ID NO: 8071 - DNA, 839 bp, Zea mays
acctccagctggggcggcagcagcaactggagcagcgccaccacctacaaacgaatttcaatacagcaaatggttagtcctttcagaatagaactggaaaaatcttatgcacaaattcaagactaacaacacaaagggtgacaaattaacacaatctagcatgaagttccagtataaaccagtataaacatgcacagggaactcattagtggatgtaaggtagttctggaacaaaataaggggccaaatgcatcctgaatgtactcatggcaatgcctctccatttcactagcacgatgaagatttgagtcacatacatgtcaaattaagcatttaaaaaaaacctgaggttcaattcaaataaacagaaagatacttaatactcagtttagtgagtacaaatacacagtaaggttcggttacactgaatgtgagatcttataatgtactactaatcggtcaagtaggatagaactgaccctatcacagggttgggtaatacgaacaatatttaaagacgttaagaattaagattgtaaaaagaattagggacataaccgaataaggtaaatctacaagaataaccaccatccacgggcatataaacacacgaaagtatcttgatagcaagacagggtgcataccagatccaacggagaggattagatcctcaacactgcgcttctccaggagcttagcgaagagcgccggccagtaggactcgaccttgatgttggccgccttcacgatggtggcgatcttctcggcctgcaaacaagaaacaccccccacataacaactcgaccgctcaaaaaaagaaaactctgagattaaaagaa

SEQ ID NO: 8072 - DNA, 837 bp, Zea mays
agcctgtgtcctccctatcacatatttgggacggatgatctcgtcaggctgtggatagctgaaaggtttgtatatgatgaaggagatgctcgaggctatgtggatcagcttgtcagcacgggaatgatttcagtacaatcttgctcctcggatctgttgattgacccgaagaaagttcagatgaacaccatgatgctgcactttcttaggtgcattgcatcacatgaaggttattgcattgcttcttcggattgtgaatctggcatgtcatctctgctcgttggaccaatccggcggctatctatccagagctgcaagaacaaggtggagatttcaaggttacatgcttcggatattcgctccctttatgtttttgaccgcacgtggacaaccctgttcaagaacttgacaaaccttcgagtgttgcagcttctgggcaacaatcttaggaatgaagatctgacgggtatatgtgggctgccccaccttacttacctgaatctgagtgggacactgatgaatctgctcccagaggaactagggagactgaagcttctcaagactctgattgtaagaggcactggaatcctgcgtctaccagtgggaattggggagctgatgcaattggagactcttgatgtaggtgacaccatggtcgtggagctaccgagccaaatagggaagctgcataacttgaggacactggacctaagaaactcaagcttgtgtgagctccccaacgaaatcggcgacctactgctcttggagactcttgatgtatgtgacaccatgatcgcggagctaccgagccaaatagggaagctgcaggcatgcaag

SEQ ID NO: 8073 - DNA, 846 bp, Zea mays
tgctccacgcgactctctctttcagtgtttctctctctccctctcctgtcgttaattattaaactttaaacgataaaaaccccagatatcagcctgacccaaaaacgttttctttttcaccaatgtctgtaaaattctatttatagaggcagcaaaaccgcaaaagcaaaacctcgcccactctacaaacacgtgacacctccgcccaccctcgccccctccctaccggcaccgcccagatggcctgctcccacatcgtcgccgccgcgggggtctcctcccccgccgcagcggcggctcgttccccggcgcattctcccgcttccgccttcgcgcgcctccggtcgacgcctcgtacgaatcgcctcttccaccttctctctcccccccttcctggcttggtccgccgcactgttgacgggccgcttgtatctgcgtaccacccgcaggtttcgcgagcgctggcttgtcggttaagggaaacggagcggcgttcccgttggtcgccgccgcggggccggccgcggcggcaccggtggccgacctggacggccgcccggccacggagaagcagcccatcatcgtcatcgacaactacgacagcttcacatacaacctctgccaggtaatttgtcgttctatgtttcctgttgtggggggcctgttcggctgttcccttccgaaatatggtgtgggttatatgtgatctgtgcgtgcggtatccttgcgactggagatgagtggcggctgcctctgcctgcgggctgtggccacacaggtggggtgggttcatactttgcacgccacgtaccatagttcctgtttgcggttacacatctggttgca

SEQ ID NO: 8074 - DNA, 827 bp, Zea mays
tttgtccatccttcaaggtgtggcaagcagcgctgagatagtcatacccactgaagttcttgcttggggtggttttgggattgttgctgggctcacaatgtggggatacagggtgatagcaacaattggcaagaagatcacagaactaacacctaccaggggctttgccgcagagtttgcagcagcttcagtagtcttgttcgcatcaaagctcgggttgcctatatctgccacgcatacacttgttggagcggtgatgggtgtcgggtttgcaagagggctcaatagagtcagggcagagacagttcgcgaaattgtggcgtcctggttggtcacaattccagttggtgctgtcctatctatcttctacacattgatcttaaccaaaattctggcgtacttcatgtgagtggattgtaaaataaaagggctgcttttaagtggtacagcccattgtcacttcataaattttgatcagtgggaaaaggattttcttttgcaaaagtaaagagatgaactgattccacaagttctaccagaaatttacaagaatttccaagaccaaataaccattttcttggaaactgagcaaattaggagaagtgtttcccagcaaataatcatggtacaggctcctgaattattgtttttttcaactttttatactaccttgtatgtctaccacaaggtcgaatactgtaacttctcgtagagctattatacatatagatgcaatgtaatggttggtcaaatttattcttgtaaattgtaatgatattgcatgactttgttcattgccaatcatcctagaataagagctcattcct

SEQ ID NO: 8075 - DNA, 803 bp, Zea mays
ataataatagtagtaatattaataacaataatataaaatgaaggtcaatatatttcaactacagatcggagctagcttaataatgagctaaatcagtaaacaaacaaactgcatgtccattttctgaataaacgaatagtacaatactccgtcagttcaaatttataaattatttgacttttttatcctaagtttgaccagctcatctaatttttgttgtgatattgtttagcatatataatatattttaaatgtggcttccaatttttcatttctcgtaaaaaaaatgaataggataagccagtcaatcatggtataaaaaagtcaaaccaattatgatgtgagatgaaggaagtaactaactaatatattgacattagttactgattgagatgggtaggttagggacctgcctgtttttttgctgggatagacctccaatgctgtcaccgggctcttgcgatcatgctctttcctctcctcagtaggcttggtcaaagaataagggaagtacgtagctgagactgagggcatcaacacaagcatcgcgtgaagatcatggacagtaaattcttagatcgaagaggattaaggttaagtgattaaatcctcttctaattattttttactaacaagaaatttattttgttagtaatttaatttccttcaatcctttttaatccagtgctaaccgaacagtccattgctaaccgacgtcttgagtagtcattccaactctccaaccttatgtcaagactgcatgatgggggaaaatatagaatatataggctcctcacagtcca

SEQ ID NO: 8076 - DNA, 789 bp, Zea mays
gcagcggcggccaaaatgatcacctccggctgcatgggtaagtacgcagcgagcgtcccgtttcctacgagccaagctcacatgaggcaggccacactccactcaaccaatcacaccgaataaggctaagtgctgatgattgggcattttaaaaaaacaaccgtaatcaaaatttgctgtagcacagctgtagcttaggcaaaaaaaaaatatgcagcgtttttacaccatttttcccagttgcaatcccttggctacaccaataacaatagtagaccctaagtgctgcatcagcgtatcagcaaaattttcaattaaggtcatcgttttctcggatacctgtcaagatcagttctactcaaatgggtatcagtaagtccaatcatagcctgtttgattgggaatataatttgtccatattatataatctaacttattttgaactaacacttagttcaaaataagataggttatataatctgggcagattataatcctaaacaccaggccctcaatcatatagatgtgcagatccaagctaccacgctatttcgacctcagttgtctgccatgcctcaaaatgtcaaaggcttcatacacaaatattccattccggagcagacatgcaaattccataactcttctgatctccatatctcgatccacatgttatactcaggctttgatctggggaactatgtctctagcgaatcaaccatttcaatgtcaactggaccaccgtttgccgctgtacttgaacctccaactcgtcggtagaaaagaacatat

SEQ ID NO: 8077 - DNA, 859 bp, Zea mays
gatcaattctatcgccgccgaatccctttaaagtcgacctgcagtccggattctgtagttaccataggcacctggatggatatcattatgtcactcagatttagcatttaactcactatatgtcattttggaacaaggcatgtctctccatactgatgtatggggaggtgatcgtgtctcaaatagtcaaattccagctacgcattgctctagaaattgtatgttgctgaatacgttgagacctcaaaatttgcagaattgtaggaaatatttactgactggtccaggcaggcaggtgcccaattttctgaaacaagcccctatcaattgttgctatcattactcctttaatccttttcacccgtcaacggaaaaacaccaacaagcataaacaaaggataatatacgcacggaggctcaaccaacattttcgagctcgccttcgcaggcggcgtcgcagagcttgggcttctcctccggcggcaacccggcggcgacggcgtcaaacgcggccagccccaaggcagaggctcccagggccacgcctagcagccccctccgggtgctgctgccgccaccaccgaccgtcccgcattgcggagcgcttccacgggcggcggcggcggccttgcagcagcacggcgcctctgacctcagcgccctgctcctgccgccgagaaaccacgccctggaggccgacgcatgtctcggccctgtggacaggcagcagcacatgcattcatcaggcgcggacgagtggccttagttagatagatggcaaggagagaagtgagcagtaagttgggggtgagcgaggatacctgaggggaggaggagcggcgaggcagaggagcacgct

SEQ ID NO: 8078 - DNA, 821 bp, Zea mays
aaggttcaggaagtgctgaagcattgccacttagatcaagtacttcaagtttggacagaggcacaagatcagtggatgatatctacaagaaaagcaagtgtgttatgatttgcatatttacgcgtaatgtttcaagcatattctctgtgctctctcaaagttaatactgctttcattttgtactatcgacattttggcaagttctgtcactgcctataacaattaaagacgtccataaatcaataatcaacattggccataagacttgacaaattgagattcttctgtttgccaaatatataccataagacaaatgatacaaagagacatgaatgttatattacctctaccaaggggttattgtccagctttaaggaagacagacagggaagggaggaaaccactgtgtgaggccacctttttatcttgttattagacaaaactaaggactgaaaagaagggcaaacgtaaaaaaaaatcatgttgagcatgataataataataataataataataataataataaatgacaatatttcctttctaagaaacttacttgaagtgatgagcataatgacaactcatttggtagatcttctattgaatttttagaaagatccagtttcaccacatcacttgtctcccacgcggcagctggtacactggtcactccaaggccactcaagtccagttcctgatacagcagcaatgtgagaaccaattcatttaaggcgaataaaaggaaaaggagaactttcttgtgacaccacaaatattttgaaaaattaaaacatacctttgaagataaggacaagcgcctt

SEQ ID NO: 8079 - DNA, 870 bp, Zea mays
gatcctttatagtcgtcctgcaggggatcagctgtggacttgagggaggcaccattgttcagttgaaccctagaagaaacgggaaacagggcaacatgtaggaaacaatgcgcacaatctgcacgggtaggagaatccatctaatcaaacatcttcgtatttctcttaacaaaaagacgagcgattcatcagcaaagattgggctgatctaaccaagagaagagggaatcaacctgagctaggatggatctccaccctatgccaatgtggacgggggtaccctgccaagagcgaacccgctcgtgaccttgccgtctgtgaggacgatgaaacccaggcggttcccgccgtctccttggccctactgcacgtctaggaccttgactgcctcctcgaaggccggcacgagcgcaacactgccatggagcgagggcatggaccccccacatgcgcggcctggtaggcggcgagcgttgagtctgtctcctagtaggaggacggggaggggagggatgaatttgattagattagagggtggcggcgctagctggaaagctatcatattttgtatccttatccaatcacatgtggtactgtttgttaggcgagaagcggggaagagaaacaaatctaagcgcttcacacgacgcacggtgatggaaactcgtgctttaaaggagtacaaaatatgctattcatcactctaggtgatgatcacccaccctgcaatggcttagcataaaccgtgaatggcttaacaagtaatgaaaatttgttaagccatttcagagtcggtgatcattggtgacaaatataattcggagtacaaataacagttgtcaattatcttctttgcttgtctagattcct

SEQ ID NO: 8080 - DNA, 892 bp, Zea mays
atagtgaggccaagttacttcgaacgaagccatgtttattctcgattatttcccattatcagcgatccatcagatagtgagatttcagtagagataaccattatctggtaccaaaaataagacctgttcgatgtctttagcagtattatattatgaaaatcccaccaaaccaaaacatgccctcctactaaatagtacgacaagattctatacactatccggattctgaaaattcgccaagaaccaaacgccagctaaagttgtgtcgtcgatgccatgtttgttctccattatttagggatccgctagatatatagtgagattttagtgtagggatgaccattatctggtaccaaaaatataatcccgtttgatttcttaattagcagatattgtaatacagtataacgagaatcccacaaaatcaaacatgcacttaagttgtcgaatgcccgtactcttcatgcgtcaacacatgacatgacgccatttatatattgtatcaggctccaccctgtcttgttcgacgggattaggaagcccacacgtggccacaaaagtcagtcagtgcagagattaattgcttgagtgcgtcctggctagaccacacagatacatcattcatatcataccgcaaacgcagatacattgaaccgtctccctccgtcggattgtcgattcccagatggctcgccatctctctacgcgtccgatcgatgcaaagaaccttccgttcttccaaagagaggaacacaggagcgtacgtatacagttcagtgcacctcgccgtctgatcaaaagctcactcaaagcatcacggacttttgggcgagggaacagtcattgttaagtgattcttgcatcttctccttcggtttcccgcaagcaactt

SEQ ID NO: 8081 - DNA, 852 bp, Zea mays
ggatggatcgatcacagtcagccattgctgcttctgcttacttgtcagtcaatgcagtgcaagcaacctgaaaacaatgaaacgtcagctcgccttgtagacggggccgaagccgcctttgccgagcaggttgtcgtcggagaagtcagccgtcgcggccgccagctcggcgaagtcgtagagcgtgaactccgagctcctctcctcgatccgccacagcttcagcgcctcctccgtcttggagctgtttctagaatgcatctgcgtcggcagcctcgtctttcctggatcattgcgcgcgcgcaggtttcccgctcgttaattaattaattaattaagcagctagtttccatttacgcctgaaatgatttttctcatcttcttacataccggctcgtttcctttgtgctctggtgaggagaaggccggcgaccagcacgccacagacaagagcgattggtacgacaagagcgatgattaagacctttttgtggttgcttgctgcatcgtcatttccacagataaaaaaataataagaagaagaagaagaaacgataataatgcagtccattgcaaccacacacgcaagagtgcaagactaactaatggagtcgttacaagttaataaacaaacctagtaagtgtacgagtacgactgtctgaagaataaacatgtaaataaacaaaacaaacgtgttcatgtgtgacataagcgtgttagaactatgcgtacgtatgtataacgtgtttaccactggttccatcatcgtccggcgaggaggacgggccaccttgcaggccgatcctgacgtccggcgtgccctggtagaactggtagccctcgtagcggaa

SEQ ID NO: 8082 - DNA, 822 bp, Zea mays
tcgagctgagagtaacttgaggataaatttgcattgcaaataaaatgaacagggttacaaacgaggtgaaagaacctcaccagggcctcccaccgcctcctggcggcagcctgctccttggtctgtctcagctcctcgtcctcttccccctcctttcctcctccgaccaccgcccccatcctcaccaccccgctccatctctggacagtggacacacagggccatgaatgaacagagcacagccaacgagagggagatgctcaagtaaaagccccaacccttgaagggaggagaccacgggcaaggtgtcgggggaggaagccggaatgcgccacggccggggtggtgaaggcgccggcgaccctgcaagcgaggccgagaggtggcgctgccatctttttgttgttgatgtgcttgcttccagttccaggccagaggaaggtcccgccgcggttgtagctgtggagcgttatccccgttgcgtttgcaattggtgcaacgggaggccggtggggcccggactgaagactctggaaacgtgaaacttcagcacggctcgacaaaagcacaagaactaccccccaccttccccaatccgcagcaattccattccccatcccaccgcttccccacctctcccccacccgcgcgtccggccgggtgccccaatccgatggcttgactggtcccacaacgcaccgacggcgccgacaagctcccgtcacgccgccgccgccgctggcggccggcggagctcgacgcgctggctgctacggcggcagcatggacaccgcgctctgcgacggggtgctgcgaggtcca

SEQ ID NO: 8083 - DNA, 736 bp, Zea mays
tagagaacctaaaatgagaactctgaaaaatcaggtgatagcttctgagcgacatcctcagtccctttcatgcagagactgctgctcttcaggagcttgctcctgctgttcctgaggatcctgccacagatacgtcaccgggtggccttgctgggcgccataaaccatcccaggaccaggcacctgctgctgtggcatgtagtagtatggatatgcgtcagctggggctcccatgggtggcagcccgggcctaggaagcccgattccgtcctccttcatctcatccctgggaacaatgtcgaccaagaagtcataaatgtcagtcctagtgatcgctgctgcaatgtcattcttttgcaaggtgcggcgcttgttctcctcagtgtgcatccacgacctaagtgtcagctccagtatgaatatctcgcaagcttttgcaaagactacaggagcttcagctgagatcatgcgaacatcttcatcggccttcatgatcttctttatcctcgcaagtggcaagttgtggttcttgaaatcagtcgtcgcctcaatttcagtcatgcgttcaacccagaactgctgaagctgctgctgttgctgctgctggagctgttggtggaattgttgagcttgttggtagacaatctggtgctgagcactcatatgggcaggattggctgggaatggctgccctgactgtaaaccagcagatacaacagaagcaggagctactgtt

SEQ ID NO: 8084 - DNA, 897 bp, Zea mays
ggccccttttagtcgacctgcagggaaaatgtgggcatcgtgcaagcatgtgtgtgggcacgcacgcacacacacgtacgtatggtatggaacatgtaggcccctcagagagaatgagcaactggatttcgtacgctgatcactactctccagctcgaggcggctacaaagggaggggagctataataacctagagacatggatggactcatgctgtccctcttggaattattggatccggaatctgcaaacagtgcgcgcgtcaacttttccttttgaatgaacgcagcagctcgatggatggatgtaattaaagaatagtgcgtctagagtacaaggtacaagcggttctattctccatccactgcctgcccccctgaccgatgcattgcagctctcaccattttctgaacaaggtgatcaacagagccgtagagagcgaggagaaaccaaagcagtttttacgtcctaatttcaagaggcaattcctgtgtcctcccgcagagactttgggggggcgacccacggcccatcttccagtcaaagttcctggagagagaaagctaaagctaagcaaagcatgtcgacatcgccattagtttatctttaggggaacaggcgcgacacatgacctgacaaaaagttgcccgcccggttgctttagcacaaaggcgcggtgcgattggtgcatttgttttggggccagatctgaagccatggaatgtctggtgtccctgtcgcctccagccaccagcaaacctcacatcaccagctaattaatagaaaaagaaaaggtgccccgccccactctccttgcctgacgctcaggcaagtgcgccgccgattagtttaaatttaacgggcaaatggcgccgctggctgcactgcaggcatgca

SEQ ID NO: 8085 - DNA, 876 bp, Zea mays
ccgcgatcctctttgtcgacctgcagctctctctctctcgctgtttcctgcgtgatctgcttgtgtagctactagctagctagcggagcggaaccacccatgggctgcgaggaggaagagaggctgctgttcccgtccttcgtctttcccgagagcttcgaggaggccgccacccccggctccggtgagtccttcatctctctctctctctctctctctctctctctctggtaccatcaatatgtaccgagtaataatccatggcgcgcaccgcaataatgtacatgtgctaccaggtggtgagcagaagaaggctcggcagcgtcggaggcgcaagccgcggccggcggaggttggcgagggcgcggacgagcaggccaggaagcggcggctgagcgacgaccaggcgcggttcctggagctcagcttcaggaaggagcgcaagctggagacgccccgcaaggtgcagctggccgccgagctgggcctcgacgccaagcaggtggccgtctggttccagaaccgccgcgcccgccacaagagcaagctcatggaggaggagttctccaagctccgcgccgcgcacgacgccgtcgtcctccacaactgccacctcgagaccgaggtacgtacgtaacgtaactgatccgcgaacctcgagtgtcctcggcgtggtatggtagtcactgacgctgaattggtctcgtaatccgtcccgttgcagctgctgaagatgaaggacaggctggcggaggtggaggaggagaagacgaagctcgtcgcggcggcggcggcggcggccggcggcggagcgggcgcagggagcagcagcccgagctcgtcgtcgttctcgacggtgacgcaccacccggccgc

SEQ ID NO: 8086 - DNA, 545 bp, Zea mays
gcagcagctctctgcattctgcaatagtgtcattcctgatttcctggccggccgtgccgtcagtccgtgctcaccatggacaaccagctggacctgttcaaggagtacaaggagaagctggagcgcgtcgccggcggcgcccaccgggccgccgacatcgtgtccaggagcctgtacatggtggtcacgggcaccgacgacctcgccaacacctacttcaccacgccgttccgccgcgactacgacctcgagtcctacatcgagttcgtcgtgcagtgcgcctccgacttcatcaaggtgcgccacgcagcaatggcacggtatgcatatgcgcatgtcacgccgatcatctcggtcttctttctggctggcagaagctgtacggtctgggcgcgcggcgcatcaacatcgccggcgcgccgcccatcgggtgcgtgccgtcgcagcggaccaacgccggcgggctggagcgggagtgcgtgccgctgtacaaccaggcggccgtcgtgttcaacgcggcgctggagaaggagatcaagcggctc

SEQ ID NO: 8087 - DNA, 806 bp, Zea mays
tccgccgtgtaccggttgcacgtcagcgtcacctcgaacacccccgtgccgcagcacccccggttcgtcacgttgaatcctacaacacggagagtagacagacaggttagtagaagcggcgtggttttcgggcgaaaacgctgcgtctctgcgcgcgagcgtgaggtcaccgtaggcgtcagggcgctggatcatgtcgagcagcggcgtgtagaggtcgatgtactggagcacggaggccgggagcgcgtcgctgccgttgagccgcttgatctccttctccagcgccgcgttgaacacgacggccgcctggttgtacagcggcacgcactcccgatccagcccgccggcgttggtccgctgcgacggcacgcacccgatgggcggtgcgccggcgatgttgatgcgccgcgcgcccagaccgtacagcttctgccagccacaaagaagaccgagatgatcggcgtgacatgcgcatgtgcataccgtgccagtgctgcgtggcgcaccttgatgaagtcggaggcgcactgcacgacgaactcgatgtaggactcgaggtcgtagtcgcggcggaacggcgtggtgaagtaggtgttggcgaggtcgtcggtgcccgtgaccaccatgtaaaggctcctggacacgatgtcggcggcccggtgggcgccgccggcgacgcgctccagcttctccttgtactccttgaacaggtccagctggttgtccatggtgagcacggactgacggcacggccggccaggaaatcaggaatgacactattgcagaatgcagagagctgctgc

SEQ ID NO: 8088 - DNA, 801 bp, Zea mays
ttgccgtgctccccaggtcacgcacacacaactttcagttgggattctgccgtgctatatataaacagaccacggagccaggtccctgctctactaccatggtctagaattcgaatagaaactgctccagagtttggacttgggagtgatcgtcatccccgtctctgctgttagtgtagataaatggttaaacggacgcctcgcctctaatccagcccgtgccgtgcctactagtgtggtggccttatctagagctgctagctacctgttgaaaagtttcattccagcatgcagtggtttcgttttgactgtgctctgctctcggtgaaacaagttacagtgctggtgacttggtgagtaggtgcataggagagggagtaggtagggggcgggggtccggtcctttacattgcatggctacatggctgtgtcactatttctttctttatcatctcatggcgtgtcaaactgtcagcaaaagttagcagtttgtcgagtatactcttcttcttctactacgacactgttttcccgacctttcctgcttggttgcatgcgttcagttgtgctattgtatttatgaataacaaacataacacatgcccgagtagagagatctcgagcactgcctgccacggcaaatatcgatcgagagccacacattcgaggaggaaggaagaacacaagcagtacgtaaagagccacacatggctggccctatctatcgccattgcacatcgcgaacggcgaagcagctcatcgcgtgcgctgcgcgttagtcagtctctccatcgatcagtt

SEQ ID NO: 8089 - DNA, 880 bp, Zea mays
ggataagcgcccagttgatgccctcaaagaaggggtgctgctttatctccgcggcgcccctcttcacgcccagccggctctggggctccttggccagcaggcctctgatcaggtccctgctcgcgttgctcgtgccggggcagtccgggaacctgagctgctggccgacgacgttgaacagcgtggcgcggttcgtctgccccttgaacggcgtcttgccgtacatgagctcgtgcaggaagatgccgaacgtccaccagtccaccgcgctgccgtggccctcgcccttgatgatctccggggccaggtactcgtgcgtccccacgaacgacatggaccgcgcccccgtcggctccacgacgagctccggcaggcccgtgggagcctgctgctgcctgggctcgccgcccttggatttggatttcttggcgctgctgctcttcttgctcctctggccgaagagcttgggcatgaagcatgtgggctggatgcatgcagcctgcgcgttcctggagtcggagttcagggaagatctcaccagcgtcggcgacaccgcgcaacgaagggagaggtcgaagtcggagatcatgatgtggccatcttctctcacgagcacgttctccggcttcagatctctgtagaccactccaagcatatgcaggtactccagcgcaaggagcacttctgcggcgtaaaacctggcagaaaagaagaaaaaaaaagagagagatcatacacctcagaattggcgaccattctgtttattcgaagtttcagactccggcaaagaatttagaatagttcaagaagcaatgatgaaaatgcgcaaacgatataggagtaataaacaatgtgtctatcctaatctaggaatcatgtt

SEQ ID NO: 8090 - DNA, 846 bp, Zea mays
tcatcaacgcgctggtgcacgcgctgtcgccggacgccacggccgcctcgccaccgtccagagtggtcgcggccgcgccgtactacccggtcggtgttcagccttttgaatcatccatcacactgcatcatcatcaacgggctaaactaaaacttcaagtctgacaagtcattttctgctgctgaatgaatcccatacggatgtgtacatgtgccgtggtgcaggcgtacagacagcaaacctccatgttcgacggccgcgagtacagatgggccggaaccacggccttgtgggccaactcgtcacgggcgaactccaccgacggcaccttcatcgagttcgtcacgtcgcctaacaacccagacgccctgctccgcgagcccgtcctccgcggctcggcggcggcgatcgtcgaccacgcgtactactggccgcacttcacgcacatcccggcgccggccgacgaggacatcatgatgttcaccgtctccaagccatccggacatgctggaagcagattcgggtatgtctgcatatacgaatccatgggcaggccgagtgacattcacctgaccctgacctacctcatgcttgccgcattgcattgcgcaccggccgcagatgggcgctgatcagggacgacgaggtggccaagcgggctttagagtacctgagggacagcaacatgggcgcgtcgcgggacacccagctgcggatgctggggatcttcaagttcatgctggccaacctgcgcggcaaggacgacatcttcgccttcggccacgacgtgatgaggagcaggtggctcaggctgagcgccgccgtgtcgcggacccgccgcatcac

SEQ ID NO: 8091 - DNA, 866 bp, Zea mays
aataaccgtctctcctgtgtcctcatccagcacgaccagattcagtacacatgatgcctgcctgacgtgagcatctggcaggttgtggacaggatcagagacgccctcagcttcagattagtgtgtgcacctactgagaataaccacagtatgtgttgcccgtcctgattgttgttttcacctatcctgataatagtaagagtttgcaaaaatgcaaaggaaatggtggagtagccatcacttgtgcccatgtaatacttcaagatcagcgtagagcgtagtcaagagttaaccagagaccaagactgggctaatcacacacgcattgggaaaccatgaaagggcacattgcacgctaaagtaatatagccacgagatctaggctaggcgcaggcgtcgcaagttggagcagcagccttgcaggcactcaattccacaacttgagccagtatcagacacgctgctttctcgtttgagccagcagcccagcaggtgcaaacttttgctggtggtagacaaaattggttacaaaaatcaacagtggcagtcctctgatttgggatggtgacactgggaaacaaagggcctgctaggtacaacttaatagtttataatgtgcttatgactagagaatgcttggtcacgcttctcaccacttgccccattagtactaaaacacataaggtaggtcaaacctgctttttctaaccacatttttcctccatttgtgcaactttccagggaagagtttattagagaagctgcaccctttgggcctgttcatttgggattataatctgtccaggttatataatctaacttattttgaactaacacgcagttcaaaatatattcagttgggattt

SEQ ID NO: 8092 - DNA, 786 bp, Zea mays
aaagaaaaagactaggtatatattttaaaacaatccacacagttgacgtacggcactgtagaacttcaggttggctaggctagctcgtgaaccatgcgagcttttttgttttgtttttgtcccttgaacttgtttcctcgacatgacatgagcatgagccagcagcacaggctagtgagcagtgactagctagttgtgcttcccctgggtgtagatgtagtcggtgtgagcgagcaacgtcctcctcatcaggcactccgcctgttcgtcgtctccgtcgtcgtcctcacattctctcgccgcctgatccggatcttgctgccgacgcatttccaccacggccactgatgagccactcttcttctcatgaccagcaacgacggagatggatacatcagcgcgctgcaagtagcacaacgacgaaagatttgtaagagagatgcacatgacatgatgcatcatgggcaaccaacaaggaataatatttggtgaacacaggagtggaacaagctagaacgactgccggccgaatggtaccagctgctgtggcgtgtggccctcggatcctggctccggccttgccgcttgccccctggtagtgcaggtgcagatgaggaggagcagagctgctaccaccatgagaagactagccttcagctgcttggagccaccgccggaggccatctctgtataggtctctctctctctttcttcgatctctctgtatacctgatgatgagcggtaatgttcagtagagctgttgttgtggcattaggtgaggataa

SEQ ID NO: 8093 - DNA, 812 bp, Zea mays
attcttccaaaactgtggaaaaacttcactctcaaacaccccctaagtgtctgcatgtctgatgcgaattaacataactgaagcaatgtgcaacaattacactatgggaagatggaagtgctgaaataggaagccaactcttccttgtttatgttttggtaccatggactggtaaggaggacaaacttaacagcatagttaacttgacaacccatgctcattttgtatttaaagtaaagtagttttttttctcgaacacgggagagttgtgtatcattatattaaagaaggaaaggggtttgagaaccccgagtacaacccacacactaacagcactagctaacacttagacaaacaaacacgcacgtgctacaccagaaaaaaacgaccaagggcagctacattactcaacaggctctagggctgaaaggaaggaaatcccccgagccctggccaacacccacaagtaagcctcttcttcagcaaggagcagggccctagccaaattaggcgcagcaccttcgaacacgcacaaattacgatgcttccataggatccaagcacctaggataactagggaactaaaacctctttgggccagatcatgaactctcaagctttctctgctccaccaaccctacaggctctcatcttcagccaatggtggaagaatttgtacgttgaagcgccccagaagattaaaccaaaactgccgggcaaacacacaatttgtcagcacatggtcaatagtctcgtccgcttggtcgcagaatggacaggtggctgggtgcggcaaatttctcttggcgagt

SEQ ID NO: 8094 - DNA, 846 bp, Zea mays
accgcggtaaacccatgttatgtatctcattgatgaacatgactcaaaacaaacactactcaaaacttcatttaattagagacaatttggcatgtgtttaaaaaaaaggtaaaagtagactgctctatacagatttaggaataacatacgataagccgcactagaacatctgattcctatgtttctcatggaatatatataatagaagcaacaaaaaaagaaaagataagaaatgcactgttaagttataaatgagataagaaatgcactgccaagttaataacgagataagagatgcactgctaaggtaatgtgaaaagctgcaccactgaaaaaaaaaatctgaaacttctgctcaacaatgtgtgagacagggcatacccatatccttcttctgaccatcccgcagtaaaaattccttctgcggtcgtaaagccttgatgctccattccatggagcagcatatttgcagcaacagcgtatgtaacaccagtccagatttcacgtgattgcatgcatgtctcgtccacctttccctttggagtcataccatttacagctcccatccgtcctcctttaaccttcatcacattgaattcaaatattttttgcagagcagttcttatcttgtgctcatcgaaaagcgggggcaagcccgacgaggcagcataccactgtcctgccagctgatcagcctgaatggatctactattgctacttgtgccgctgtcgtaattgaaatatgacccattccataacttcgcctcatatactgctttggcttttataaactttagcttgtacttctcagcaaagtgccgatccccaaggcgatgagccattgta

SEQ ID NO: 8095 - DNA, 805 bp, Zea mays
cacgcatgggtagggtagaccggtagagccgagacgagactatgcttcgaggaaacgcgcacgcagggggggtcgagatcagatcgaccaccagagacaacagcggctgctggtgctgactttagcatttcaccggctaccacactacacagtgatcatcaaacaccaccgatcacggaattgcctgcgacccctgctcgtcgtgagcatgtgcgtccgtccatcggtcaggtcagtttccggtttcttttccgcttcctttttggggaacgatcgatatggtcggagggggtggggtgggtaaccgtagtgcgtgcagtgcaggtacggtgagcgcgcgatggtacggccaaccgagcattatgcaagctcacgcgatgctgtaccgcgcgccactgggtagctacagacacacgccactcacctcgccagctacctagctggcgccaccttgcattggtgcttgcttggtttggacccaacgttcatcatcccgtcgccggcggttgaagcgtacgtagatctacacgtgtacagggtataacgtcaccgacagtcctccctacttggtttagatctgagagtataccaacctctcacagatcgacggggcagctagctagtcgcaaggaataattggggccggattcggtcgtcttccgtgtcgctcgcacgcatgcgaggacgacgacccctgctggtcggcggcgacaatcatgcggttgcggtgcgatgcaacacgcaaggcgcccgcggccgtggccgtgtcgcgcggaatcttgccacggcggcctcttgttgctct

SEQ ID NO: 8096 - DNA, 841 bp, Zea mays
aggacaggcgagttcatcatttgagaaccagctccggccaattgatagatatgcaatgcgctttatggaactctgggatccagtaattgacaaagctgctttaaatcatcaagtaaatgttgaggaggaagaatgggagcttgatcgtattgaaaaattcaaagaggatttagaagcagaaattgatgaggaccaagaaccactttcttatgaatgtaagtactttgtgtctgctataatttctttcttggcactttggagcagtctgttcattatcactttggcattctgcattttagctggagctttgtgttcacctcaatttaggtatccttcctttttatgctttagtaatattgagttattgacatcatctttatttcttgcagcatgggatgttgattttgctacgacagcctatcggcaacatgttgaggctttaactcaaaagcaggtcgttattgacttgctaacttgtattcttacgtgtttcacttgaaacacagtgcctttcttctctcttctgacttgttataatacgtgcagttgttagaagaacaggaaaggcaagctcaggaagcaacaaaagagttggaggagaagaatgataatatgaggtactaattggaaaattattttcctgaaacacgaacaatggttgcaaattttgttttgtgattgtctcagttgctctttcttatatgtcaattggcaatattagcatgttatgtgcccacattatttctaatggatgtttttctgtctgttgatttttttttgcttagtctatagcttccctttgatatactattgagtattgactgtacattttggcattcat

SEQ ID NO: 8097 - DNA, 791 bp, Zea mays
agaagatcgcaggcatccatgcacacacagttactacaacttacacgggagagcagaggggaagaacaaggtggtagaagccaagatctctgcttcgcttcggttcaattcacaggtggcctctgatccagagcagcgtccgccgggcgaacgacggcgcctcgtcggctctggagctgaggccgtgcccgccgcccgcggactcgacgtcccaatccacgacgctgccgctcgcgctcttgtcccaagccgacacgttgtactcggactccgtcacggggctcaccacgtccgcccggcgcttcgccgtcgtcgccccaacgtcgctcgccgtgcgctggagcgccgaggagagccggaacgacgacgcgcggcgcgaggtcgttgcgccggagggcacgtccttcctcctcggcccgctgcgcatccatatcttggagacggagaagctctccctcttgtccaccgccgctttcgacagctgctgctgctgcttgggcggcgcatcgaatccgcggaagccttcccgcttggagtggcagtcgcactccgacatggcaacacggtgccccggcatgcgagagcgagtcgcggggcgctttttctccggcagcttcacggcgacgcggagcagggagctctcgtccatgacgtactcgtaggtccccatggagaagcaccgcctcacgtcatggcttccatggctggcgctgccgccggctccttcggtggcctggcttctgaacttgccgagcttcaccggaacgaccacctcgtccttcttctccgct

SEQ ID NO: 8098 - DNA, 786 bp, Zea mays
aggtgggctggaagctcgcccagttcgcgcacaccatccgcgtcgacttccagtaccgtggcctcgtcgccgccacgctcgctgacctggagccgttcatgctgcgaccggagggcggcggcgacacggacgacgagcccgaggtgatcgccgtaaactcggtgtgcgagctgcaccggctgctcgcgcagcccggtacactcgacaaggtcctgggcaccgtgcgcgcggtgcggccgaggatcgtgacggtggtggagcaggaggccaaccacaactccggcacattcctcgaccgcttcacggagtcgctgcactactactccaccatgttcgactccctcgagggcgccggctcaggctccggctccggctccggctccggccagcccaccgacgcctccccgccggccggcacggaccaggtgatgtccgaggtgtacctcggccggcagatctgcaacatcgtggcgtgcgagggcgccgagcgcacggagcgccacgagacgctggtccagtggcgcggccgcctcggcgggtccgggttcgagcccgtgcacctgggatccaacgcctacaagcaggcaagcacgctgctggccctcttcgccggcggcgacgggtacagggtggaggagaaggacgggtgcctgactctgggatggcatacgcgcccgctcatcgccacctcggcgtggcgcgtcgccgctccgtgacgtgcccaccgtccggcacagcacagcacagcacagcacagtggaagctaagacgtcagtgaacgctgct

SEQ ID NO: 8099 - DNA, 894 bp, Zea mays
cttgcatgcctgcagaagatattacctatttacagcgtcggaaaccatgtggtagaactgttgggtcagttgggtcacagaaaagacattgcagaagaagtgtcacaccacctccaagttcacgaagagtgtctctcctaggatctagatcgcttgctgaaaatcctatcccatcagtgtcatcccatgactcgtgtttaccccataagaggcttgagacagctgaaaatagggacccatgtgctggggggcacataagtagctctgtgactccctgcacttctttgaaaaaccttgcatcaccgagttgcaaatcctcacaacctttgagtactaatttgaatactgatgctactccaagaaatttagacagaatggtaggcatacaaacacaagcacttgccaggagctccagttcgagtattttgcattctcaaggccagaacagtgaaaaagtgtctgctagtttgccaaaagaggcagtgacaaatcctgcgtctcctagtcccaagcaaattggtgctcaacatccaagtgacaatcctcttgttacgaaggcaggaccttctaagagtgtgtgcacacctgagagtgaaaagttgtgcagcagagacatcaatttaactgcaacaagtactacagttcctgtcttgcaagctcctgttgtggagcctgcattgctaagctcaacatctgtgttcactgaaaggccctttgaggtttatcctgacacaagaactgctgctcctggcatgcaggaacttagtgtgaagcctgtgttgctgaccccaatacctgtgcgtcatgaaccttctacggaggtatattataacactacaagatcaagcccaaatcctagatcggttttttgtaacaaaaataatgcaatttggc

SEQ ID NO: 8100 - DNA, 823 bp, Zea mays
gtcagcaccccgggattttcctgagtcgacctgcagccatgtcaatgaagactcaaagagatgcatttatcacttcacttgccaagtttacatcacttcactctgctgctgatattaagcagaaaaatgttgaagccattaaggtttgctctgtttattaagacataactgttaagccatctgctcttcacttggttggaccattctcaatcttcttaatgcttgttgaaaagatcataacaaatattaaatcgaaccatgatgcttagaagtttgcttccttttcaagtttaaaattcaacccatttatacgacatgtgggtccaggctaaatttggagaagtacttttgataccttgattgatgtagtgagtagtgatactcatataagactggagttggttccgagttagagctgcttggtttaataatgggatgaactgaacatttagtaatattgcattatcacattgagcaaaatattctaatcaaggagcaaatttcccaattccctgtttgcggattctatccttcatccattcttgtcatttgaatgccttattgtagattgagtgatatgcatgccttatgtcgtgctgctagttgcagtcttccatattttagtttgagaatcatgataaaatcttttatcattcttatgttctcttcttatggtggtggattgcctcacaggcaattctattaattgcagatgaagatggaaattacttgcaagaagcatgggagcatatattgacatgtgtttctcgttttgaaaatctacatcttgttggagagggagcacctccagatgccactttct

SEQ ID NO: 8101 - DNA, 851 bp, Zea mays
agatcaaacatggttcaaaaaactgctgaataagaagatagaggactgtaatgagtggaaatgaaaagtgaaaaaaacacagatctaaactaagtgagaagaaccataacaataagcacaagcagcaggcataattcttctgctatcagaagcatgttactgaagttcaaagcaagcagataccttaagaaaaaagcatatgctatataacatgcaccatccaacttatactacaatacagtggcatggcagctgaaacttaactaaaaataccacatgccctcagcaccgccaaactacagcacataatctagcttaacacaatcagccctctttgaacctgtggttaccgattgcttgcaaccaaagaaaatgcatagcattgaaaacaagagataagaagaccatttgaagctgatcggacaatcacagagagacatgtgacaaatggttgcccgagcatgtcagcctacatgaactgtaaattactcagcaaccgatttgtaaaccacggaaaacactgaatcgaaacctaaaaacaatactaaatatgcaggttataacttatacagatcacacatcacagcaacatcaattctgaaaccaaggactcaggcggccaagccagacgataaaagttcagacttcagatatcgctttgttaccctctccgcgatgctgtgggggtcggtcgcctgcccacgccgcgcccgcacctttggcctcggtgccggcggttgtggcccgactgccgcaccgccttgcttcggctgctgcgcgtggaacacctaaaacccagccaggacacacaaaaacatggctcggttagggctgcaggtaaactatagagg

SEQ ID NO: 8102 - DNA, 844 bp, Zea mays
cacacaacggagatgcgactgcgcacgtgccccacgagtcatcttcctcttttttttcccaaatcaacataggaacatgtatggtgaggagtcgattcaaccaagggagcacacgttggcagaaaaatggatttgactgtgagcttcaggactcactcgcggacccaagggtggttttaatttgtctgatggagtccttcctgctcagcggcggacattgggcaagagaactgaggagttattccaactctagaatgacattctttttgggacggaggtagtatgtgtgggacagttatataagacaatttgctgtaattattcatatcatagtgccatagccagattgatggtagaagattggctattattctgtagcttcaagcttcatgacttccaagtctatgattttccttgttacagagatgaactgggagctttgttgatgtttctctctatggcatattgctattcaagataaataaattataatttatgtcttccccccgctgaccgagttttttatggcttctatagttctatttgaatagtttgaactaaccttaaaattgatcttaaaatttgaatctgatggaatgcagatcgtccatgcataaactaattctgtacttcagttttgggcattacataggagcctttcttaagcgttaacttatcactcgagcaatggggcactagggttctaattcattgttatgtttactaggccattatagtcttgtatgatagctgcttaaggaaaatgcttcctttattttgtggattgatcattacactacaccattcaggaaagcgcaaaccttcgcccgagttttatcttcaa

SEQ ID NO: 8103 - DNA, 723 bp, Zea mays
actagaagctgagctctttgcttcagactaaagtcagctatttaaaccactgcagctgtattttatatagacaaaacattgtaaaaacagtagaagccgatataaattaatgtcaagcgaacagtactcgatgtaaccgttcgcatccatccaaacaaatctgacgaccttatcctaaatcaatcagtatccgatagaaccgttccaagaaaatatgaacaaaaaattaatgtcgggcacatacttttctaaccttctagaattagatggtgtttggcttcgtcggtgttggtggtctgctgctattcatcatggattcgtcattcgtgggcaactggacctacatctggagaaaatatgtgcttcttgcagcaaagatggtcaggtggatgttttcaaggagctttctttgaaagtagcagcgacgccattgagaaagtaacggggtcgtccatagtactccatacacagccatatcctaaaattatccatctctagttatttaactcaaaataaagaggccaatgcccacaaaccactaggtaatccagttaaaatctatttttatttaaaaacaatttgatctaatttttttagataaattcttttcgtcttagtttatatagcataataagatgagcagtaacacaaacactctgacagctctttagataaactcattttgtcttagtttatatagcataacaaggtgaacattaacat

SEQ ID NO: 8104 - DNA, 897 bp, Zea mays
tgcatgcctgcagctaccacattaatttcaggtacagcagcagctggttctgctataatagctgcatctgtggtgctgctctctggcttttttttgtttttcttcttggatccaccaatgttctcaacaagctttgagccagatgacaaatgctcaccatgctcatccaggctaggaacttcgactcttccttttgcttttttggagctagagctgactctttcagtaccaacataatcaccattagaatcttggcctgcatggcctgatctactagcaaacctttcattctccgccaacctggatgagtcatttgcatcttcattaatttcatgcagatcagagttatgataaacatgcatgtccagatttcccgcccctttccgcttcctttcaccacttgctgctggaggtttcatgacatcactaatctgttctgtcaccatcacatccacatcacgtaaatagccagtctctgaacccttcccttcgaatcctttgctctgggagggttctaaatctgcatcagtagtaggatagttcattttggccactttagcaagcttgtttggctttttggcaccatgtgctggtctatgatacccagaatggtgacgctctggcttccgttcaagataatgcacttccccgccatcttcaaacttttccgaggaatcagattctgtctcatcactttgagcatagacagcattgctcctggagtgcttctggccagtcctatctagttgtgtactggatttacctgccatcttcgcttgtgatatcttgcttctagggtcagaaccaacatgggcatcattaacctgctggtcaatacttttataggacttaaccttcaggccataaccagcttgatctttcctgctcctgtaatca

SEQ ID NO: 8105 - DNA, 868 bp, Zea mays
ggtgccgcagatgctggaggccaaggtcagtgtcctcatttctcctgtggtgatcttcatccttccactatctggcaagctttacttgtatattttttttatttatttatttctgtgactgtagatgctggtggccaaggtccgtgtcctcatttctcctgtggtgatcttggcaacatatccaaacctttccgtaggccaggcgacccagaagagtgcggtgtaaaagcatacgagctggtctgtagcaacggcaaggctacaattcgcatcaacacggggacatattttgtcaccagcatcaactataccaatcgttccttctgggttgtggacgccaatttggatatgcacagcagctgccctcttcctcgttgggatcagtttccttacacttctgagggattgttctggagaagtggtaaacatacccatatcgatttgcccactgatgatgcctctttgtgggcatgctttgttaattgttcgagagcagttaggattacgaataacttggggtacaagcccgttacttgcctgagtgggagcagttcctttgtttatatatatgtacagtatggggcttgcacagtcggatctcttgaacctttttgtggatacttggccgagatttcctttggtaccaatccgaagggtactaatgcaagttatgcagatatcatacaagtggtaaagaagggattttctgttggattcccaaaggacgaatatgattatagctaccataatacttcttggatattcaagacatgcctaaataattttaccaggtgagtctggagtcgttggttggttctatatgtccttgcgagtttggtttcccagcattgcatgcctaaataatgtt

SEQ ID NO: 8106 - DNA, 742 bp, Zea mays
gcagccacgaaagcgcagttaaaaccaccgagtgacgaaagaacacttcggctcccccatgttttcattccagcaatagctgtccgtagtattgaagtttccaagtcaatattgttggcagtttggccgttacacactgtactaatatcacggctgtttacataatgggaatgcaaattcaaacttgcataaatgaacctccaacttcaacaagtaggaaagcaaagttcactgcatagggacgttggaaagattcctggtggaccaacacatgcagccaaggtgtgtttctccagctactcaaattcagtcaaaaacaacaggtccttcatttgcctgatgcatgggcatttttgaattgtcaatattgctaaacgttgtacaaagtcagttggctagatcctcgtttcatgcctgttcatccgagtcttcaggcctgcgtgcccagttttctaggatcactttacctgtgcttatctcttataatctggcgtgcctgtatattttgtaattcgtacactacatatgaatacagagaacagatattctcctcttctagttcttgcatggtatcagctagaagatcctgagatcgcaccttttctcatcatgagcgatatgcatagctcagtccacagcgtcaccactcaccaccggcggtcttcacaacagttcctcccctctacttggcatgccaccgtcgccggctttcggcactccttcctcccccgtagttggcgac

SEQ ID NO: 8107 - DNA, 800 bp, Zea mays
cttgcatgcctgcagttaggtccaacgacaatgacgcccacttttgaaaaaaaaagaaggccagcaccaatgttcactttttgttaatttaggttaacacaataaataccagacctttgactctttagcagacccagaagctgcattatcctgcaaaaggataaatgaaatcgagctaccgatctgccagatgttcagaaacagaaactgaacgtgccgtataattagctgcatgcatagtttgatcaattcatcaaggatcacattccaacctaccttactgtttattggtgcatgctaaccgaactgtgaaactctctgcatcttccagctctcagcagctcttcgccagcagacacggacgggcgaaccaagaggctcgtcgagatcatcgtcccatcggttgccgcaccggcgctgctgctgctggccggactctgcatctgcgccgtgaggacgagaaggcgcaggacgaaggagaaggaggccatccccctggcgctgctgagagacgcgcagaggcagagcgcgccgttcggacgaaggaaccagatcgccgcgtccaccgacgcgcaggacgagtcccttcacgacggccagcagggcggcagccaggactgcgacctgccgtcgttcgacgtcgagacgatccaggccgccacgggcaacttctcggctcacagcaagatcggccagggcgggttcgggcccgtctacatggtaaaccgaaaactccagtcttgcatggcatgcatgtaatgtatggtaaaccgaaaactgctgatgatgatggtgctctt

SEQ ID NO: 8108 - DNA, 815 bp, Zea mays
acccggcgattctctattttcgacctccagcacattcagcctcgtacccatttgcaacacctccaagttgtgctttgctacacgagggatctcaatctcattcgcattgtcgggaatcttgggcatgctacccccccagtgggtggtgggcatgctatggcgaactcaaagtctacaacgactacggttggggaggcacacccctccttgtcgttctccatcgaagcctcctcttttctctgttggatgtggactacaccatggaatctaggtggttgtacatatgcaactacgtagctcagatggtgcccatcttcaaccgaagaggccaaaaaagtaatagtctaaatatattttgagttaagaataataaaataaaccaagatgtaagaggcttatttttacatgttaaatttgtgtggttgtagctcaaggacgacctgattgtctagaggggtatagtgttagaggcgtatgtcataggcctaggttgacaatatatcccattagtgttagggttggttagagataaggaccacttgcttagaggtcaagtaagagataagaaaagattcgcttgttcaggggtcaaataagacataagaatcatttgcttatggatcatataagcctctctatataagagaagacatatcaatttaatcaagcaagaattaagaaagaaaacccttccgttttgctcggcgtgagcaagaccccagaccggcccacctgtgctccctcaaccctagccaccgccataacaagtgccatgtgccaaataagatgagaacgttagttttaatttttttgct

SEQ ID NO: 8109 - DNA, 786 bp, Zea mays
cctgcagttcttctaataatacattgcagccttcccttgctgtcgatgtgaatgagttgaccaaaaactatatatggtcgctgggaacgtcgatcaggtggtgattgtttttggtcatcttgtctataaaatactacactagtagcagtgacaactcacatatccgagcaggttgacgaagtcgccgtagttgtggtggccggtgttcctcttgccgctgacgatctctagcagcagcacgccgaagctgtacacgtcggacttcaccgagaagatgccctccgaagcatactcaggagccatgtagccactaaagaaacatcgttaaattagcaaggtgtctaaaaacacacataaagacaaacttgttcggcacaacattacattgcaagaatatcaaagtgggccatatacatgcatacatacatacatacgagtgtttgttaaaacttactatgttccgacgaccctgttggtgttggcctccgtcatgttggatccaaagatcctggccatgccgaagtcggagatcttggggttgaggtccttgtccagcaggatgttgctagccttgaggtcgcggtggatgatgcgcacccgcgagtgcttgtgcaggtagagcagcccctgagcgacgccctcgatgatacggcgccgtttctcccagtccagcaacggcccccgctgctggtcgaagatgaagcagttgaggctgcggttgggcatgtactcgtacaccagcagcttctcctcctcctggacgcagcagccaacgaacagcggcag

SEQ ID NO: 8110 - DNA, 867 bp, Zea mays
tccaccgtcatttccaaattcaatgaacctaaatatatgagcgaaaagcattatttcaacattctcaacaataaactggtgcatcaaaagaacgaagtaattgtgcgacaattgaaagagagaaacttaaaagcatcttggggattggagaacatagatgcacataactttggcactaaagatcattggtgaagacccaagagttgtaacagtcaaaaatgaaacccaaaagtgcacaggtcttgatgataaaaagattatgggtctaattaagtgtaagctgcatagaaatcttactacctcattaatggtatgcattttttttggcagacaaacataagaaaaatgagcaatataatagtaacaacagaatttctcttcaactcagccatgtatcagtttttggttagcaaaccataacttcagtatttgaaatatctgataagcagttagcagagtgatatgtttaaagggatacatcagttttacaataaaaaatggatcttcaccaaaagcacaagccaaatgtggcatacaagctagtactgctgagttgtttttaatgcattttctcccactaccatgtatcagtttttggttagcaaaccataacttcagtatttgaaatatctggttggacaccaaaaaacaacactagcagttagcagagtgatatgtttaaagggatacatcagttttacaataaaaaatggatcttcaccaaaagcacaagccaaaaggagagaatgcataacgcgttaatgataagaccataaccatgcaaccgaagctaaggattgtgtttttattggataggatgatatgaacagcggttgaagttatgagttgggcactgcaggcatgcaa

SEQ ID NO: 8111 - DNA, 799 bp, Zea mays
gctgctcatgcttcttctctgtacaggcaaattattgggtggcaactgttccacacgcggatgctttgccactggctctacaggttcgcattgttgaaaacgcaatctcttcaactcaagttgatttagtgtaccattctccagagatccagaagcatcgtgagtaacttggttgtgattggcagcagccaccctacaatttggacccgtgttattcgtactgtctttcaaagtatgatcctgtgctgtggccacaggcctcaatctctgaatctgtaacaacctggcatcaccattgcaagcattcaacacttcagcagcctgataagccttctttactgatgctcctacaggtctccctgcatccagtggaggtggcgggcactttccctggtaggcattgtagagaattgcacggattagccggttgtgcagttgaaggttctcccgccccagggtatgcaggcacagcttttcaaagtcttgcctgccgagcctctctgataagtagccattcaagtagccaaaatatcgccgcgagcgatccggaccaagccgcttctccatctgagctttgagctccctgagatcaatacggccattctgctgttgctgctgcggttggggagctgatggctgctgccgcggtgcagccactggccatgcctcctcccttactgtgtccatgcagttaccaccgcagcaaaccccaatatcagacccggagtagagaaaccaatgaattggggatagcacgccgcacccagctaggatcaaaccattagggcttgcgccgctt

SEQ ID NO: 8112 - DNA, 794 bp, Zea mays
tgaccatctcatctgagtcaggactgaatctgaacaagcatggacagcagtggttttccagacctggaaggcaacctcatgcccgtctatactctatacaattatgagtatgcttgatttgcttgatccggcggaagattccttcccatggcattcagatgtcatcgttattgaaactgtaaggagcggagcttgagcagttcgtacttgcgcagctgacctgggaagtctcatactcatgcccaagattgcgcagcctgttcagctccggcaagatttccttcccgagatccggcctgtctttcttccgcagctccgcgcaccgcagcgccagcttggcgaattccagagcctcttccaccggccagtcggtcaccgtcgggtcgaggatctcctggaaggctcctctctctatggcgttctccacatggtgcgtgagccccatgggcgaccttgccgtgatgatctggagcagcatgatgccgagcgagtacacgtcggacttggtggtgagcatgccagtctgttggtactccgggtcgatgtagcagaaggtgccggccgtcgatgtcatcctgtactgcgtgacgtcggccgcggactgtggcaccagcctcgcgagcccgacgtcgctgatcttgctgacgaagttgtggtcgaggaggatgttggcgggcttcaggtcccggtggacaagtggttctggcttcgcttggtggaggaagaggagtccagttgcgatgtcagcggcgatcctgaagcggatgctccatgggattggcaacgtttttcct

SEQ ID NO: 8113 - DNA, 837 bp, Zea mays
ctgcagcactaagcttagcttagctttgagagcttctccattgtttgcagcactgctaataaagtgctgccgctcttttctctcctctcctctgctctcctagctatacgttctttcttccttacagtacccactgctgctgttcagctgagctaatgcagtgttaagctcagttactgtcgtcggtttcagcaaaagcctcgcagtgtacttgcgcctgaacctgacgagaaagagagcgaggtcaaaacagaggggaaccaaagctccaagaaaggggagggaccttcttcgacccgcttccatccagcatctcgctcgtccgccgctcgaggtccttcctaatcggcggccagccagccagccgcagccgcctcctttggcaagaaggacactagttccacctgttttcttgcaaaagagctttttttttttcttccatccctctctttttcttccccatcgttcgtgtgctgcccccaagaagccgggagctagctagctagcgagcggcccaccggccgagtttggagctagcacgagcaggctgctgtaggcgttggcagcacgctctctttctttccctctcggcggcatgccttcggcggcattaaatctcggcacggcggtcgagggcagcttccaaggcgccggcggcggcatggtgccgtccgcgcgcctcctcaccgctaacggcggcggcgcgccgagccgtcgggaggagacggccaacggcggagggcctggctctgacctggccgcgctccggcccaccaaaaggccgcgcgggaaagcccagctggccgggaagcccaggaggcgggcgccgatctggaa

SEQ ID NO: 8114 - DNA, 772 bp, Zea mays
cttgcatgcctgcagaaccgaaaccaaacaaatgcctgcgcagccacgccgcctattaaagcaccaaagatgttgccgtggcctcgccgcacaagaaaatcacagcagtacagcaccagaaacagaaaggtagtagatcaaggaacgccagtgcggcgacaatgaccggcagtggaagcacgggcgccaatggcaagagccagagatccagggccaaggcaatgctgttcgccttgggcaagagctttcctgaccaagttctgcctcaggagaaggttgtggagagctacctccaagaaagcagctgcgacgatcccgccaccagggccaagcttcagcgcctttgtaagcttctttgtttcatcacagttgctgttctataaattcatcttgtcttcacgttgaaaattttaggttgacaaatgcagcttagctctagtcataaacatctatggtctaaacaacaacgctcactgaataaggaaaggacaatgagtacaatagatcaccatatacagccttcagtatttatgtgatgattcgatttgcctccgataaacagatgagtattgcccaaatgattttattttccaggcacgactacaacagtgaagacaaggtacactgttatgtccaaggagctattggataagcacccagagctgaagatggagggtactccgacactgacaccccgccttgacatctgcaatgccgcggtgatcgaccttggtgctgccgcagctcgcgctgcccttgacgaatggggtcg

SEQ ID NO: 8115 - DNA, 781 bp, Zea mays
tgatggtacagtagcttagatacttttgggacatagggcttgtttatttcggcttctggcagcttctggccaccaaaagctgctgcggactgccaaacgctcagcttttcaactagcttctataaaattcgttggagcaaaaaccatccaaaatcaacataaacacataatcgattgagtcgttgtaaccgtcactttctagatcctgagctctataaacaactttatatttctccacacgtaatcgtaatgatactcagattttccccacaaccaaattctcctcatagccagattttcagaaaagctaatcagaaaaaagctgaaccaaacatcctcagtcgttttgttgtaatggccatagagcatcataccaaagagcaaatagtcgttatgttgtaatggccagaatcaaatggctagtatagtatatgtggcgtgagcatttattttgaaagaaaaaactagccgctgtcaccaaaccaggccaacagcatatctgtcgggcttggtcgtacgtgactccatgaccatgtccatgctgtagacaaacgtggcgtgggacatgatacaagatcttgtaccaggggcatatgtcgaagcgtctttactttttagcattcatagtgtcaaacagcatattagccaaccaacaaaataggggaaatctgaaacgttggctttatctcactgtgagttttctgattacagagaggttagaacacctcccgaagcgcctgagctgtgtccatgcaattcggtgctcacccttgcgaaagct

SEQ ID NO: 8116 - DNA, 778 bp, Zea mays
agagtagttatatatgttttttactggcacacaaatcctgacttgagttactgcaaactgcatccaggagaagaactcgagtaaaacttgggctgatagccaaagagcaccagcaacagaactatctcaaacctcatattcatcatcaccctcttcgtcattctcatcccttgatggcaacaggtcaacacaacaagacctatcatccactgaccgaatgctatttccagagaggccgtttaagagctcgccgaagctcaagagttcttttgacagtgacaatggactcgactaccctgatgatgcgcttaccaagtccaagaacatgcccatagttcaatccagcctgccaactcttggtataagaaatcttgtgaaggattcaatctacaaggatagccatgaattgtcagtcagaattagcactgaagaagaagtaaaagatcacccatccaactgtggagatcaacctatgcaattgaatgggcctcaccatgacagtacacaaggaaaaagcaagggtctcatggacatcaacgaatcgcttcgagtgctagccaagctcagggaagcctcgtggactcctcctgaatctgttcatcatgcaagactctcatatgatgctcctcggttctcatacgatggaaaggaagcaacatcaaaattgagggaggtaccgaggttgtcattggacatcaaggaaggtcacctttggaatcgtgaaattgactctaggttggacccaagcttgaggtctgcaggtcggctaaagtggatc

SEQ ID NO: 8117 - DNA, 847 bp, Zea mays
tggacgccgcccatgtcctggatctgcatgctcagttccgtcagcgcgagcgtcgaaggctccccagcctcctcgccgcccatgcctgtcacgcggaacttcatcagcaggatgcattccgccacctggcagggcaggacctccttcgccggaagcacagacccgaaccgcagaacgaagtcagcatcggtcggccagtgcctctgcccgctcagcgggtgccagctcgtcaggttcactgccctcttcatcttcttgttgacaacaatccagctcagctttacaccatcgttcaactccctccatagcttgccgtctttcctttcttgctccattgagggtaccggtgacaagccactgacagtggataggaatacatctccgttgttgttctcgttgttttcagccgagtgttgagacaggtcgatccggaacgggtagttgtagaaccatccattggcactgtctgagctgggaattccccatatgaccttcgagtagagcgcatggcctttgtaccatacatcgatcaaagacacgaaatccgaaggcaatgagttttcagaatcgtccatgccgccgtcgtcgtagtagtagtagtcaagactcagcccattcttcggcaaagaagttagtttcattggcttgaaccacagggacgtccttgttcagtataagtgtgaaacaatccgcatagaacttcctgaacccaccagcagaggcaattaagctcctaacgtcatctcgtctcattgatggccacagagatgtgcaggcattttcccacagatcctcttcatttgatatggcacgaaaatcagcgcaggcacagcctgctcttgccaga

SEQ ID NO: 8118 - DNA, 763 bp, Zea mays
ggacagaactcctgtaaaccaccatctttgagaaactcaaaccagaattgcttggtgaaaacacaagcaccaatagatgattaaccgtataccatgaaaccctaaagaaattaaaacagtgagtttcttaaaaaatggttggattctaaccataacaacctggtgactcggtaagacagttctcaccattgcaccaggcctgcccttcttaaaaaagggcagacccagtgctggaggctcccacatgagtgggttggttctgggaaagggatagatcgacgcaaaccttcccctcgcaagtgcagatctaaacccgcgacctagtgagtcagtgagaccgctctcaccgctgcaccaggctagctctttttttgagtatacagatacggtatggatattgaatgtccgcattcggatacggcttattcatttagcatatgaagcccttcagtcggatggttttgtcctacaacaagatattcaggatcatcaccactggaagctggcatgatctggcacatgtaccagcaaatctttgccaccataaaatttgccccatggtggaggattcagacaagttgggccccttagagctacattttttcatctggttggccattaacatcaggtgttggatggcggatcaccttgcaaagggtggcccacctcacccaattgcctgccccttttgtgatcaagccaaggagacaatcaatcacattctgcttccctgtgttttcactcggcaaatttggtctctggt

SEQ ID NO: 8119 - DNA, 783 bp, Zea mays
ggtgcctgcagtccttccttcctcttcaatagaagtaagctgtgctccatcgtttccatgaatatcatttgcaccattaccacccttcactacccgagagctcatcattttgtcaatgatgctaagtgctgcacgtacccgccgctgggactcaacttttatgggcttcagttcatccaacaaccccttatccaagaagagctctaccagcttttccatgttgccattattctcttcttccaattcttctgagcttccattcaaatcttttagttcttcaaagtccccatttgtttccatcaagccctctaaggctttgattgcttctgtagagctgctgctaccagtcttctcttgcagtttgtccaagttagttacatctttcagatcttctgatttaccatttgcttctcgtgattcagcactggcatcggattcctttgggctttccaagttgttgttatgttctgcattctcggatccctcctcttcatcatcacaatgtattccgatgccgctattctcttgtgcctgtcctgcacctgacgcaggatccccagtagctgcatatggtgaaacgctgggtgtggtgggcacattcgctgcatcagccaacctgtccaagaagtctctccatctgtgcgccctctcctcctcctcttcctaacaaacaatcctcaaaaggcaaaataaaaaatctgccataaacagacaaggaacataacatttccagcacggtaaaataaattactaccttgtaaatcttggcgtactcgcggaaac

SEQ ID NO: 8120 - DNA, 802 bp, Zea mays
tccagctccacttgcagtacatccgaccagatccaacatttttttttgttcaactgaaaacctctcctgctgctgctgtctgaataatgcttcacatttttaccgtcttgtacattggctggtaaataacagtaaattcttgtttgaatttatgcgggaagagagacccaaaaaaaaaaacaattcccaacgtgccgtgcaatatctgcggattgcagctgcatccactgcgcgccgcgcgttttttttttctcctcctcctcgacaacgagaagtcgagaacacacacgcacacacggaacggaagctactagcccgcagccttcttcagtctcccgtcttcttctggtgcccaacacatcctcattctcagggtcgccctctcgattctccctcaagtccagtccagccggatcaggtccccttcccctcctccacaaggtgccgcctcccgcagatccgaattggaatctgggccttcgtctccgcaccaccaatccggtaaatatacgcgggcaataaaaatccctccctcccccccgaaccgtaatgatagatagctgcttgcctgctccggagtttcttccgctgttctctctcgcgcaaatttttatgctgggcaaagacggtgttcttcagcttcgacccccaaaaagggcgaagctttcgcgtccttccccacacacacaaattacctgggagccgtagcttctgtttggtgcggccacggggtggaagaaatggtatgcgggatgctcgccaattggcatgctgcgctttaccgtccctgcaggcatgcaag

SEQ ID NO: 8121 - DNA, 827 bp, Zea mays
attattaacatgcagaaacgcagataacattgacggtggtgttgttacttattaacgagctggccgcctggcccctgcgcgatagcgcggttggccacgaggctggtggtgccgtacacgggcagctcgtcggcgccggcgccacgaaggctctccagctcgaagaggtcggaactggcgtcgctcctctcctcgtcctcctccagctcctcgaggccccgcaccagctcctccacccttcgtcgcaccaccgacgcctcggcttcagggtggagccgtaccgtcgtcggctccgacggctgcggcgcatcagcagccttcgcagcgctcgtggtcgacatgcgcggaggatgcgagattttgggcggaggggtcgttcttgctggtgccggagccttgggcttcctctggaggcgcgccgaggagaacagagccttgagtgcgcacgcgaacgtcgccggcgacgacggcggctgtggcccggacgatggtggtggcactgaggcccttggtcggattcttgccacggggaaacatggcctggctttcttctttggtttgctgttgggtggcggcggggtcgtctcctccgcgtccgtggcgacggattcctctgacaatgacacccgcggcgggggcaggccgtggcggcggcacgtagactcgatacctacggtcgacgccgacgagcaggagaggctgctgtagctagcagccgatgagtcggacgacgacgcggtcgacgacgcgtaccccgaccccgagtggcgcgggcgcgcaactcccgcctcccgccggcgcctgtccctgtccgcggtcgacgacga

SEQ ID NO: 8122 - DNA, 936 bp, Zea mays
attccaatcccttcctccagatacatacagcatagggcgagagtggctgagtgagtgagggacacagtttcgttccaggaaagcctgctgcacacatgtgacgccttgaggctgtaagttgctctacccatatctgccgaaggatgcgcgtgtttgcattgcagtgttcttgcttcttcctcctcctcctcctcctcctccggtggctgccggctgcggcacgcatggccatcggctgtctcgcgattcccggtagttctctttctctgcgcgccggccggaggcactcaccgcgccgtcgaattattctcgccacgctgtgcgacacgccaccgaggtccaggaatacggatcctattcgaccactagctaggagctagctagaaccacgaacccagcttccaaattcctttggattggatggaagtggaacctacgcgtcctcggcactacttaagctagcaaagcataccatagccctgctctcctgctagctccaaccgccgtcctgattcattcgtctgtttcaggccctcacatgttgaattgttgatgctaaaatgtgctgcatatatatatatatacgatgaaaactatcgtcaatgcttttgatcaagctcgtctatctactgctgcgactgataagttggttcgctcgctgtgcccgtttgtttccctgctcgtttgttcagtcccgatacctggtctggtgatcgctggatgatggacgccaagaagattaagctgcacgactaccacctctacggatcgcagcagctgtttcccgcggccggggggctctccttccacccggctccggggctcatgagctccctgccgcagccgccgcatgccggctggctgcacgaggaccaccgcacgacgaccccgaggtcggtgctcgcgacacatgggtcgctgcaggcatgcaagctg

SEQ ID NO: 8123 - DNA, 822 bp, Zea mays
ctatgttttttcctttctatttctttcttgtttcttttggtttgtttcagaattcaaaagaatacatgttctaggtttgtatcgagttaaactaatttaaatatagaagaaaaaaaagtttttagtacgcatgccttcgaatggatacatacactatgaaaacatatcttataattaatgcttaattctcattcgacatcataatgttagcccctttcaaatgttagtgacctttttatgatatatgaaaaggtactgtatatgttcacagaatcacaggcacaatcctatcaggctacttacaagcatatagtaggtgatttcgtagatgacatccttgcacgtattttatacgtttactgtttatacgagcattgacgggtcccgtggccgtgggaggaagagaaggcgtcggcgtcgccaacggaggcagagcgagtgtgagcaggtggaactaagcgatcaatcaaagcttaggaagctgtcaaattgactcacccgacagcgatcccccatccaccatactacaaggaaaatgaaacgcccatatacgtagtatatattgcgcggccgttggttttccgagggaaaaaaaacgcgcgatggttgtttgttgttgggagaattgaaggagaaagaaacggccggaaacggaaacaaagcgagcaattatctttttcgcaccgacagatttcgtcgctccgggcctccggctgaacggcccggaagagctagctgcggtcgaggctgccagcccaattgtcgcctcaccactcgtgccggccggtgagtccgtattttttttcttaccgctgctactgc

SEQ ID NO: 8124 - DNA, 883 bp, Zea mays
atttttgtttgggtcgttttgatacatgttattgcctagatgctgcatgtggacagagcatgcacgtacttttgttatgttaactgtcgggaacgagattccgataaggaatccaaataccgcaccaacgatcgttactacaacgagcctcatgttttcgttaggcttcgacctgatggaactgtaagtaaaaaagatatgcatcacagatatttatgaatggattgcaagggatggatggcgtgcaaacctgcgtgcaagtaccggaagtttggccattgcctggaacagcgggccggcgggaaaagtagggaagagcgagacctgcgagcggcgacttctacgcatcgctcggcgggagcataatagtgacgggtacctggtcctgaaagattggatggattagtcatgcatggaatggaatggaacgacgggatggatggatggagatgggaaatctcgagaggagttgtgtgcagaagtgatgatctaaaaccttgttgtcgagaggagggggagagggagaggagaggaagaggagatagggattacttacctgaatcagtgaaagctgcaagatggcagggaggacgcgcgatcgagatggtgcaatggcgcgtggacggtgacgacacggcggaggagaaaccctaggcggcgctagactagaggaggctcgctccggcgccgcgtggttgatgaagggaagaatgggccacgcgtcagtggtcagaggattctcgttccgaagaaggaaatggatttcaaggccatcagaaccaggccacgacgtttcgtttcgtttcgtttggctttgcctccctgtctgtctgtctgtctgtctgtccttgcctgccttgttgcagctctgtctgcaggcacc

SEQ ID NO: 8125 - DNA, 829 bp, Zea mays
gcttgcatgcctgcaggcacggcgccagtttcaaggaaatcggccagagaataaggtctcggtctctcgatcttatcgaacatacaagcgtttcttttttaaaaaaaaagcagcttatttcagtcaatagaacttgattgttaagaacgccgacagatcgcaccgcgcggattgttttccattgctgtgaactggctctgctttggttgttttgttccagtgagcacgcggagaagtacggatacggcatcgaccccttcgtggggcacggcgttgggaggatgttccactgcgagcccatcatatggcatacctgtaagtgattaaaacaaaaaacgcataccgtttcctggtcgctgtggttaatccagtccaagcaaagcacgcacggcctgaatgcacgtccgtacggcattgttgttggcagacgattacgagcccgggttcatggtcgcaggccagacattcaccgtaggtaagaaagagcagctaaagcgtccgtcccacaggacctctctctctctctctctctctctctctctctctctctctctctctctcccatgatcttttatcatcgttcagggaatggtcacgtgctgagaacccgtgcgatgcagagccgacgctgtcgatggggagcacgcagtgcgtggtgtgggacgacgggtggacggccgtggcggcggacggcagcctcagcgcgcagttcgagcacaccgtgctggtcaccggcgacggcgcggaggtcctgaccgggttcccgtagctgcctgcacgcatcacgtgagcggtgagcctgggtgggccactgcgtcggcgagggacg

SEQ ID NO: 8126 - DNA, 776 bp, Zea mays
cgtccctcgccgacgcagtggcccacccaggctcaccgctcacgtgatgcgtgcaggcagctacgggaacccggtcaggatctccgcgccgtcggtggtgaccagcacggtgtgctcgaactgcgcgctgaggctgccgtccgccgccacggccgtccacccgtcgtcccacaccacgcactgcgtgctccccatcgacagcgtcggctctgcaccgcatgggttctcagcacgtgaccattccctgaacgatgataaaagatcatgggagagagagagagagagagaggtcctgtgggacggacgctttagctgctctttcttacctatggtgaatgtctggcctgcgaccatgaacccgggctcgtaatcgtctgccaacaacaatgccgtacggacgtgtattcaggacgtgcgtgctttgcttggactgaattaaccacagcgaccaggaaacggtatgcgttttttttttaaatcacttacaggtatgccatatgatgggctcgctgtggaacatcctcccaacgccgtgccccacgaaggggtcgatgccgtacccatacttctccgcgtgctcactggaacaaaacaaccaaagcagagccagttcacagcaatggaaaacaatccgcgcggtgcgatctgtcggcgttcttaacaatcaagttctattcactgaaataagctgctttttttttaaaaaaaaacgcttgtatgttcgataagatcgagagaccgagaccttattctctggccgatttccttgaaactgg

SEQ ID NO: 8127 - DNA, 910 bp, Zea mays
agacacaatagcagggaatgttatcatgaattacagctgaaaatcagtcgatagaacataaaaaggaatgactacgatacctaatgtattgatgaaaaatggaaaaaccatggaggcaggtgattgaacatgactagttagtttttatataaaaaagatccatatatgacatattcttatcaccaagcatgaactgactacaaaaccataaacacaatacccacactagaatagaagtgcacatctttgtaatatttgtaccttcaagctctatgtcattttcatgagcagcttctaacatggacattccaactggaacacgtattgtcttttctgagccatccttgttaacaaatgttaccgagattctgtgcataatacagagaaaaataaccacatcagtcatcagaggactgcctctactgaaaataattattgaaagctcaaccctaacaattcagtaaaactgatcaagctattgtttagtggcatctattcctctaagtgtggaaggagcagctccttaaatggagagacaacaataacaaaagaattccatgttagaaggaactgggctaatctgatacctggttccaagatacaaaacaaccaaggagttcaaatttagttatataaagaggatgaaacataatcactgttcttaaggcgtcgcctaggcgtccaggcggaggtccaacgccttgcctcgccttaccgctttaaaaaccatgaacaagacacaaatgcacttacttatcctttgcctgactgctttcatcctgatcaccacttgttgcagttgagaaaaggacattccgctgaaaatatataaacaaaaaattaatacaaataaacttgagatagaaaccatcactcctgcaggtcgggtataaaggaaaccggggtgggg

SEQ ID NO: 8128 - DNA, 814 bp, Zea mays
atccttgaaaatgatcaaagaagctcattgttatggcatgtggaaggtgtctctggttaatgcaatctacagagataacactgagaaaacaactacttcctccgtttttttatttgtcgcgttttagtttaaaaataaattagcggacgacaaatattcgataacggagatagtaggtaggactgcaccatatcaaaccatacgtacatgaaaaatgctcaataaagattcgggaagcacacagcaaacagaaaccaaagaccagccataattttctgttactgtgaagaacattaaattccatcagctacaagcttggccataattttaaaactaaaaattctaggttagataacatgatgaatttcttatatatgaatatataattctatgtattgtgcaaacatatcaataaaaaaactgctacttccaaaaataattaccccctggacaaatgtttaaaaagagtgtgcagtattccaaaggttactatttgcttattagtctcaaaattagcagggaacagctagtggtgaagtatcaagaaaggaatgtaaaaatccttttaacttcaatatccattttattatcaaccttaagcaatcctaaccaacttcatcataattgaacatcaactcaagacctttgggttcttgacatatctatcctatactactaagctatctctaggagcttactcatcctcatagccatattcaaactccactctgagaacagtgtagtttacagtgcaaaacagcgttttgggtaaccatatatgtgaactgttgtacatggtcacaaaggttgaagt

SEQ ID NO: 8129 - DNA, 882 bp, Zea mays
ctattggccacccgccgattttctagtttcgacctgcagaaataagctgtcgtaactctattattccctgccgtttcaccaaccaccgctagttcactccctcaggcaggcatcgatggcattgtttgacaagattgactgtatttgaaaccctgccaaagactacctccaaaatggattgaattgaatcagctgctagttgaatacatctctgatctaaaaatgtttatttacaacaaagaatttcatcagctctctatcaacaatccctgacaaaattttggcgtccttggggaggggagctaggagcatgaaaggaagttaaaagtagtaaaacaatgttggaatgctgtccgttagatatgcagttgtgtaggagcaaaatcgccagcatttacagctgaattgcttccttcccactagttcaatgagttcgtctcgagcttgatttcttatcccgtgctcgcttccgtgataacttcttggttgcagaagccttccatggttcccttgctgcattttctggaagcatctttctaggttggaagcgcgcgatgggagaccgctggggaggccatcttcgtaaggcagactgcctctgttccaacagttctcggtggtacgactgtaaagtaagaatggtgcaagaaaaaaaaagagaagtaatcaataatagacaaaacagaataggtggttactcgttctgtaataaacgtgccatcacaaagaatgtgctgttttccctagttctatggtccatcagcaatgtatatcacagcaaaacagcacacagaaaatcagtggcaataaatcgaacaaaaaaaaactgaaaatacctgaacaacaaaatcacgcctttcacaatccaggaacatgtcacag

SEQ ID NO: 8130 - DNA, 859 bp, Zea mays
gcacgcaccacagtgtcaggatgcgtccgcttcgtcagctgcgtgcctgcgtgctacggttactactgcccaccgctactactggcgattgggattgggcacccacccccagtctccacagtccacaccacagcccaacgcagccacagccagggggcaacgagtgaagaccgcggagcgggtgaggaccctttgacttgtttttcctggatgtgacgactgacgcgcgcggcctcggccctcggccggcattcccgcgtcgcagcagcgcggagctgcgtgtcccacgagcccggcctgctttgctccaatccgagccagcctttgcccccctccgtgcgcccacacaaggagagcggagaagaagtgaagaacccactgggcgcccggatttccgccgcgaggttcgcgtccccccgattcctcctcctcctcctcctcctcccccctgctccatgattttgttggccttccctttcctctccgagcgctctgccttttgcggttctggctttgcgtttgcacgataccgacgctagggcaaaccagcggtggtactttcctcaagattttctttgtcgagggtaaaaagtttggttcggggacgacgccacacaggaccaccgccatggtgacttcttctgctactggtgtgcagtgcagagcctctcgtgtggtgtctgtctgttgagcatgtttcggactggaccgagctcacttcgtttcctttacaagcgaagacatgtattcccccacgcgacgcggcgtactgcctctgtagttcgcatttcgagcgggcatttcgagcacagcctcccgtgccgcgcccattcaggagggttctgtgctttctgtcaat

SEQ ID NO: 8131 - DNA, 844 bp, Zea mays
tcgttcaacaccaaagctgcgggcatgtgttgttgtggtgtgtcttcttctttaatttgatgcatccaccaaccatactaacgtaaccacgggatcaacatgtttaattaatttagagtccccatcttcttcacgttccgtacgtggtgtggtagctagcggcggcaagcaacagcaccagcaactgctttaatttgaagcagcagcagcagcagcagcagcagcagctagctagcagagagagagagatatcgtcgatggagagacatggaagccacgccgcggccaaaatgttgggagaagacggaacaaaccgccgtgtgacagcatcatatatattccactgcacgaataatcaatgcccccaagctgttccagatcgatggaacagctaacgcatacgacggcgactgttggtgatgagctagacgagatcactgcaatgcaatgcaatgcaatggaattcattgcatataaaaccaccggggtccgggcacagcacaggatgagtagcgtggaccccaccaccggtcaaccacgtacggccacgcacacgagtattactactatagctgttccaacgacgcgtgcatcatcgtcgatggaagaccgtgccgctcatgtccccaatcaatgcaaatcctactaagatatataatcacccctctcgtcctcctaaaccccacgtacggtacgagctgagcgcctagacaagatatcatagaaacttgtaataacaacaataatgatcttctattctatgggactgggagggaggcatgcatgattgctgcatgggggtcgtcactctggtctgactgtgccgccgcctcaaaaggcggtt

SEQ ID NO: 8132 - DNA, 824 bp, Zea mays
tggagcacgtctccctcacctccttgctctccgaccgccgccccgccgccgggctcacgcgcttcgaggtgctcctagaggaagaggagtcgggctggtaccgcgccgacccgaccccgcagccgccgcgacttcctgagccacaatctatgcccccgcccccgccgccgccgccgacgacgacgatctcgcaggcatcgccggtggacgcagacgagaccatggaggagaaggattgctgcatcctcagccaggatttcttctggcacgttccggaccgagcctctgtgttggtttactgagtgacactgacactgtgcgtgtggtctcagatgttaaacctgctcgtcttccctgtgtttgcagcaccccggactacatcacgccggagatgccgcaggtggccaacgagttcgacgacgacgacaaggtggggaagatggttttttattctctttttttgagcgtgggtatatcatatatcatatatgccagtgcagtggtagtgtgctgccttgttgagctccactgtttgcttggtttcgtgcaggagaacatcccctgcccaaaatctccggagaagtcagcgaaccctcgtagcaagcggtacagaaccggtgagtgagaattccacccctcaaactgattactgattgattgcaatctgattccgtttctgccacaatatccgatgatccagctgtagtcagtacagtagcagctgtaaactcaatcaattctttcatggtatgtgctggcccgttttcttgctccctcttaagtgggtgaatgcctgaatgccaataactgcaggcatgcaagat

SEQ ID NO: 8133 - DNA, 858 bp, Zea mays
atctggagagttgctcctgccccacagggcgacaagtatcagtacacacacttcgcacacaaaataaacagcttcgacacggcacctaagaagctgttggcatctgattcacggctgaggcctgatagatatgccctcgagaagggtgacatgtctaagtccggggcagagaagagcaggtactttccccattctctgcttttatgattatatattggaatttcgaatggcctgtttgcctgccttcagttttgacaccacccccgagtttctgcaaactttcaggctcgaggaacaacagagagctgagaaacgaactcgagaggccaagggcgagcaatttactcctagatggttcaacctgacagatgtggtctcccctacaccgtggggtgacctggaaatttatgaatacaacggcaaatacacagagcaccgggctgccatagaccgctccgatgtcaccgacgagacagatgtcacttcagtcaagttcagcccatggcaatatggtagctcatcttcccaatgattctccgtggccagaagccgccatgcctacgcgcattgtgtaaaacacttccaggcctggctttgctggtttgttgtgccatcagcggtttccttgcccttgtagtattgtggccttcccccttttttcccttaaatgctacagttattcaggaagtggtgtagtccgtgtactgtcgcaagtctagcagagattgcagagttttgttgaaccgttgtgctgttgtatttatgcgagataactgataaccgaaggtaacgaacgacacagatacggatggaatcatggagctggagcagaacatatgtgcaatgtgctgcctgcct

SEQ ID NO: 8134 - DNA, 887 bp, Zea mays
tgcagaacagaccggctgtgagaagaataacagcagtggatctgttaccaacatgcatggcatggaataagaggaccgtggaattgaaattcatctagtttaactagcatggataccgaaatgattatagtataaaagaggacagatcagagagtatggtcatgtttatgcactacatgcctacacctaataattagcggcaaaaattagctgaagagatccaattagtctagctattggtttctacttttagcagattagctaatagttagctagctaattccgctactgattttttttagccaactaattattatcagccagcaagtacctctcatgggaaatgggactagaaaagagaaggtaaaggaaggcgctttttcattcagttcggtctctgttaggtgcggagagctagcatggcagggaatctgaactcctccatcaaatgaattagacacgcattctcacagctagctgctggtgctggtgctgctcctgctccggcgacggcgacggggacccatcgatggagacaacgaggccggccggagccacctgaggaaagcgagcgagcgcagcaattgaagatttgcaggcgtgcatagtagtggatgagccgacatccaatgaaattgcagagtacagatgcaatgcaagtaaggtcgcctgatgattgcatccaccatcatatccttgcaccatttttattttattttatatatatatagacgtactgaggctataggataatttacgataattactatactaattacgtcgccaagataaataaagtgcgagtgtataggaaataaagggaagcattgcatgcaatagaattgcattgaacgagtccaaagttcgtgctgcaggcatgcaagatg

SEQ ID NO: 8135 - DNA, 883 bp, Zea mays
aagctggcgacgaggcggcgcttgaggtcggacacgtggaggcagcagaggaagcgggcggcgccggcgccggcgtcggaacggtcgcggtccccggaggcagacgagcaggacgaggatgacgaggcggcggtggcgtcatcgtcgcccgagcacgacctggcgtagctggggatgtagtcgcggagcatgtcggcgacgtcgcggtagcgcctgagcgcgaggagcgcgcgcgcccggagctccagcgccgcctcggcacgcggcgacatctccagggcggccgtgaccaggccgagcgccgccgccgccgccgccgcgtcgtcggtgtcctgcgcggccgcagcgagagccgcccgcgcctcgctgaggtacgtgtcgaacacctgtggcacatggacgcatcgccatcagattccatccaaccaccaaaccgtacgaggaggaaaaggacaacgaaataaatcaagccgcgtcctcgaacaagtcaaacagaaagaatgcatcacacacacggcacggaagagccatctggagacgaaaggcgagagcgcctggtagatggaaacagcgagagtggcacctcgggctctcctctcgctctcgggattgcaaaggcgaaatcggggagagcaacgcaatgcaatacaatgcaggcacgaaccttgttgttgcctctcagccagttgatgcgtttcttggccggagcggaggaaggggacggcggcgccattgcgtcccgccaggcatcaacagcggatcaaaaaagggaagaagggggacttctcccctccgtctgtgtcgtctggagtagattgggctgagggatgagtttttgttgttgttgttgctgctttgagcaggcagaggcaggtgtgctgct

SEQ ID NO: 8136 - DNA, 850 bp, Zea mays
gagtgttgtcatgagtcttagagctgctaatgaggaaaggatgcaatgggagattgcttgtgccaaggggctctaccagctagctgttccgttagctgagagataagtagagtctaatggattcttttttgtatgcttcttactggcctccgtaaggaggtggttttgttttgtactggccttttttggccccctttttacctcttcttaatatattatgaggcgtagttctcctgcgctttcgagaaaaaaaaacacacacaccaacccacgccccaccccaccccaaaacaaggccaccaaattttcagtataggccagtccacctcatgatatggtcatttattctcatggaaacatggttacacccatttcagataagggtttactcgccctgttataaaacatagttaagttgtcattttttaaaagttgtgaagaggagaaacctgtccatgttggtacatgctgaagagattggtaagtaaagtgtttttcacctgataaccctgtagtcccattttgtccaaaaccttttgacaggagactttttcatcatttctatcagaaaagaacatggtcttaattacagaacagaaagagaggggggcaagcattccgttgtagaacaatgatgcttacttctctttcaaaatttcaggagcaagaacacgaaaacgatgtagaaaatcatgaaatagtttccttgtgggataaccagcacagctgattctaatggcttcaagaacaccctattaggatggcatcattagtgaactgcatcataaaacaagcatctagaaatttggcaaagatgtatgggatattttccttacagaacatcgaagct

SEQ ID NO: 8137 - DNA, 865 bp, Zea mays
ttgcatgcctgcagccttcaacctggcagtacgatttctgctgctgcgcggttggagccgccgccgccgccttcgccttcttcgcaggacccggaggggtcgctgcactggcagtgcctaacgccggcgaactcttgccgctctgccctagtccacagccatcttcgaaatacgttctcttgccaagcttcaggccgagcaccaccggctctccgctgctgatcaccgaaccagtgtccttgtcgggccctttggcaggtgcgaaactgatgagctccatgttgttcttgttcttcttccccttggcattgggcagagaatggattgacgcggatacggaagaacgcgccggttcatgccctgtggcctcaaggcccgcaaactgaggcgcggcagcggtcgtcctgtggctctcgctcccgtttgcggctgcgggcggcaggttctcccagtcccacagcagcacggaggccttctggttccagtccatgtccatcccaaacgagcccatgccagttgccagtgccaggatccgaaatctgagctgctgctcctcgtcctacttgcctgccgaagcggctaactctgaaacaacaacaacaacaacaaaaaggaagagagaagcaggttaaagagcagaaagggttcgggtaagaacaagcatatctggggcaggggcactcagttatgcatcatgattagattcgcagggtaagtacgcgaggtggcaagaacagaacagcagttgaacgtttaacagaggaatcgtcgatcacggcaagaacagaacatagtgtagcagcaccaagagagagaggcaagggaacataacctacggccacgacacgagtacgccagtcaaggc

SEQ ID NO: 8138 - DNA, 765 bp, Zea mays
tctcgccgcgccgtctccgtcagcccgggcttggcgacgcacggcacgggcagccaccacttctcctcgccgcggtggctcaccggacggcacggcgtcgcgacggaatcgtctttctgccctttgtcattgacgtaccagaattcagtcttctgaaagctgtacagaatctcctgcgaaggtgcagaagaacagcttattagctcaagctcatgtcatggcgtagtacgaagaatctttgatctttacgagcaacatgtcgtccagcttctcgagggcggggaggttgacgtagatgtcggatcgcggtcgggtcgccatcacctgacagaatcaaaacgcgtcagtgactgaatggcccgccccgcggaaatttcctcttcaggcaatcaacccctttaacctgttttcacctctcgtatgctgccgtcgggcaagatctccttggaagggaagaactcaacgatgtagtcgcagacggagaggaggcagtccatctcccgccgccacatggacttcttctccggcggcaggggcttcagcctgtggcagctcccaaagacagtcgctgtaagcagaggaggcgacgacgagcattagcattaacctatcgatctgaatatgggaggttggaagaagggtaataaggccgctgaccgtagaggttggtgatggcgttggagatggccacggaggtcgagacccccttgccgctccccgacatgtcctcgcccaagagaagcttggagaacctctccttgatca

SEQ ID NO: 8139 - DNA, 835 bp, Zea mays
tgagatgagatgggagacacagcaggcacgccactgaactgtgcagtggctgtcaatagattctcctttggactgtaactgtccgctgttacatcgccgttttctacagcgggatggcgaccggttttgctagctactacctggcatttattaaaccggcatgggggaggtggtggtctggtggatggagatgcatggagggaactagctagaggaatctgttgcatgggcaccatgcccgtgtggttggattggatgtctatcggcgcatgcgcatgcattgcaagcaagcccaggcataaaatatacaacttggcagtgtcacaatccaaaaaacaaaaaaaaaacatcctgttgttgtatcggttcaattcctacacctaccacctcccggagagacgaccgccgtgtagatagagaagcattatgaaataaataagcatatatgtaacgtgtacatgtagcaacagtcgacgctttgttgttatatacggggccgtaagcatatggcataaagaagcatgcatgtgtaggcaacagtcgacgttttgttctgctgtacggagcataaatcatattaattgcatacggtggcgtgtgcatgctgcgtccttgcatgcaaatgcatggacaagcaagaggtagctatagctagctcgaccgccacgtatacgtacgcgcgcgccacctgtgtggcttgcattggctagctagctagcttgctgagggagtgacgatggttaatcatctttagttagcaagggccaccaatcatccatcatacctaatgattgcaagcatcagctttacctttgcgcgcgagagacctcagatt

SEQ ID NO: 8140 - DNA, 880 bp, Zea mays
tgaataatataaaccttacaacttacgagggtaaaacaaaccttttcgagcagaaaacaaaacaccttgttcacatatgaagccaagattggccctctctggtctcaaaaaacaaaagctgtccttctctattgatagaacatgtattttctctgaaatcactcggttattcaaatgtaatgcatccatcgtctttcatcagagattgaaccaaacattctcataacagaagagtttcccagatcccaagtaatggagggcttgagcacagtttcaaagttgactaaatacaggataaactgtaatggttctagcagtgtccggttgctgtgttcattacggatcaatactaaaaagtaaagtgctaataatgaccacaaagtgaaaatgcaggatacctatcctaatttgtacaaatataactagaatcaaccaacgttacatcaatatgagaccactagcgctcaagaaaaaatgtaatcatacataaaaaaaaaccgaacacagccgattccctcgagtaccccgcatgacgccatttgtacatagactagtcaaacggatcgatctgggtcagcgcagaaagagcggcgacagatctggaaaccctaggtcagatcagcccaagggggaaggagaagaaaagcgagatcggacacctgggagaacttggtctggagctggtggttgacgtcatcgaaagcgcggcggagggcggcgaactccttgcgcgcctcgtcggtgacgagcaacttggccatgccgtcccagtcgatgatcgtcctgccggccttcaccgccgcatcgaccaccttcttcgcgccgttgccgctcatattctccggcccgccgctgactcctccctcggcctgctggatct

SEQ ID NO: 8141 - DNA, 807 bp, Zea mays
atcaatcaaattaaagaacacaccatcgtgtcgtcagcgcgattaatcttgctgctggtacgtaacgtataaagaaaatgaacaagaacggaagaagagagatggaaaacgctgtacgtactcgaacggcacgtctccgacgagcatgaggtcgccgtccttgtcctggtaggtgacggcgaactccgacaggttgttgttgttgttggcgctgccggaggagacgaacatggcctccagggcctcccggagctcccggtaccccttgtacatcctcaggtcgagcttccgcaggtacggggcgccgtccatgctcaccttgacgaatgagccggccccggcgctggcggtggcgtttgaggcggctgcggacgccgtgcagctgggcgccggcgccgcagcatcctctttgtcggccgccttgctgctgctgctgctgacggcctgctgctttgcctgctggaagcagctcttccggtacgacctcaccggtggccatccgaccacgggcgccctgcaagagttggtgacaagtagctggcgcgcgtgagcaccaccggcagcatatgcgcacagaagagatagatatgctacgtacgtacacgtaacgtacgtacgagagacacacgttcggttcactctgaacgtttcggtgctcagatctattagctactcacttggccgccgggggtgctgcctccgcgtcgcgcttgtttgcctcctcctcctcggcggcggggcgcttcttgcccctagtagggttggacggcggcgcggccaccttcagctgggtctgctgctggtgct

SEQ ID NO: 8142 - DNA, 902 bp, Zea mays
tcgcgagcacgtggaacgtgggcggcgtggcgccaccggacgggctggacctgtcggactggctggacggcggcgacgacgacgggccctacgacatgtacgtgctggggttccaggaggtggtgccgctgcgcgcgcgcaacgtgctgggcgccgacaagaagcgcgtcgggatgcggtggatcgagctcatccgcgccgcgctgaaccggtcgcactcgcagcgcagcaggggcggcggcggcggtaagcagaaggtgcacccggtgcgggacggctgtggcggcgagctgggcagggagtaccggtgcgtggtgagcaagcagatggtgggcatcctgctcacggtgtgggtgcgctccgacctccgccgcttcatccgccgccccagcgtctcctgcgtcggatgcggcgtcatgggctgcctcggcaacaaggtgagtatatagtactgtacttggttactcccgaatatatggtggccgccggcgcggcatctctagctaagctaataagcaaacggtcgagaaacgaatggcagggtggcgtgtccgtccggttctggctgcacgacacgagcttctgcttcgtctgctgccacctcgcgtcgggcgggcgcgagggcgacgaggcgcaccgcaacgccaacgccacggagatcctttcccggacgacattcccgcgggggcacgcgctcaacttgccgttgccgcagaacattctagaccacgagtaagccactcaccactgctgtgctagctaagctacctgctccctcaatctatccactaccacttcatgcatgcggccatgccatgccagccaggaaacagatacaggtcggccgccggcccagttccaagatatctgtgtgctgctgcagaacgaaactagaggatcgg

SEQ ID NO: 8143 - DNA, 649 bp, Zea mays
gcgaactcgaggcaccagagcacgtcccctattgcgggccgctccacgccgtactccgcgaggcacttctccgcggtgtcgacgaacttcttgagcgactccggccgtatcgacccagcgatccgctggtcgacgatgctgtcgagctcgccgtttttgagccgctgcgtggcccactctgccaggttgaccatctcccggggcagcgtcgggtcgatgactggacgggcgcagagcacctccagcaggacgacgccgaaggagtagacgtcggacttgtccgtcagcatctgccgccggaagtactccgggtcgaggtacccgaagctgcccttgacggcggtgctgacgtgcgtcttgtccagctccggcccggtcttggacagcccaaagtcggcgaccttggccatgaagctgtcgtcgaggaggatattggcggacttgacgtcccggtggatgatcgccttggccgagccggtgtggaggtagtgcaggcccctggcggcgccgatgcacacgtcgagcctctgcttccacgagaggggaggcagctcggagtcgtagaggtggctccggagcgtgcccctggccatgtactcgtacaccaggatcatctcgccgcgctcgtcgcagtagccgatgagcgaca

SEQ ID NO: 8144 - DNA, 746 bp, Zea mays
aggcgacgtgcgggttcgacgagggcatggtgatcggcgtgggcgggttcgggaaggtgtacaagggcacgctgagggacgagacgcaggtggccgtgaagcgcggcaaccggcggtcgcagcaggggctgaacgagttccgcacggagatcgagctgctctcccggctgcggcaccgccacctggtgtcgctcatcggctactgcgacgagcgcggcgagatgatcctggtgtacgagtacatggccaggggcacgctccggagccacctctacgactccgagctgcctcccctctcgtggaagcagaggctcgacgtgtgcatcggcgccgccaggggcctgcactacctccacaccggctcggccaaggcgatcatccaccgggacgtcaagtccgccaatatcctcctcgacgacagcttcatggccaaggtcgccgactttgggctgtccaagaccgggccggagctggacaagacgcacgtcagcaccgccgtcaagggcagcttcgggtacctcgacccggagtacttccggcggcagatgctgacggacaagtccgacgtctactccttcggcgtcgtcctgctggaggtgctctgcgcccgtccggtcatcgacccgacgctgccccgggagatggtcaacctggcagagtgggccacgcagcggctcaaaaacggcgagctcgacagcatcgtcgaccagcggatcgctgggtcgataccgccggagtcgctcaag

SEQ ID NO: 8145 - DNA, 840 bp, Zea mays
agtagaccaattactaaccttaatttccaacaattcatgaatcatgattaagaaatcggcactaaggaggaggaaaaatagcaaggaaatgctgttctatgcaagagtctccggcactggatctgaccttctaatcttgctcctatgtaacctagaagatgaatggtgggagagtattgcccatagtcacaacattcacgggccgactaggtcgaggaaagtggtacactatttgcgagaggcttttacatggcggggttgaaaatgaccttgtgtacacaggtcagatcaatgtaccttcagccctgttttctgcgactacgaaattaccaaaaatgtgccataataatacctctgtattgatgaacttctcccatcagagttcttagcagcagcggcggcagtgctcttagcagcctcagcaccagaaccgtctccatccaatttgcacaacacatttgagttcacagtctcaatgagacttgtaaaattcttgtacatatccccataattctttggctgctcttcgacaaagaagtctttcacactacatataagaaaccatgttaaaacttgaggctataaaattgaaaatttaaacgagtaaataaacctcaacagaataggggatgagaaaaaaaccaactaaacaagtgtgtcaaaatatttctgtaaatatttgctaagtacttagcagattaccatcacactacattcatattttctttttaaaagattaaagatagagaataactcaaattttcctattgcatcatatgcggtcctttgaaactaatagaaaagcatagattgtaccatctagtactgaatcaagatcaa

SEQ ID NO: 8146 - DNA, 890 bp, Zea mays
taggtatgacaagtcttgtaattggtctcacactcagcccaattggaccgtcaggaacagaagatgtcaaccatgaccaaatcagagtaaaaataggggggggcaccatcgagtgggaacctgatactcgttcaagtcaattgccagatactgtctagaatcgtgtacccatcaaagaaaaacgcgtctacaactctacatcacgtaacatggcgttgtctttgtcaaccgaacataataatcccgagaaagcaatagtaattcacaccagccgaagtaagtaacaggcaacagtggtatgatgatagcgaccccacaaacaagcaagtggtatcacttacttggtggtaaacaagaacaagaactgaaggtggaatctttttcgggtttccaaagaacgcggaattcggaagccttgggatgggagttcagctcaagcctgaaagaggcccctcatcaaagacgaaaaggatagggcgtttggaggtggggattttgggtcgagccgggaacaaatctgcgcatcggcggcaggaagctcacctttttcttgtcaaaatcggcgatcacaaaccacacacatgccagccaacacagcagacatgcagccggaggaggtgattcacgcccaagcccccgcagaaattgagcggaaagctaagctttcgatgcagggatctaccgcaccgcgctagaggaccagacagcccgcctccctcgatcataatatagcaacccgagcttctttttatttatttatttacaacaaagctataggagcaaagcaggatgacacgcaagagcgagcggggagagggaggaagagagggaccttgaaggcatggcgaggcttgcatcccatgagatgcagggtgctctgcaggcatgca

SEQ ID NO: 8147 - DNA, 801 bp, Zea mays
accatcttctccgcgatcagctgctggatcacaacagcgtcgtcggccatgggtgagatggggaagtaggactagcgacccagggaaggagggtggctacgacccttatagaggaaagagggcggcgacaaccctagataggagcggaatcgagaaaaaaatcaatggatagtgtgtgtcactaaatgtttcataaattgacaggccttggaaggccaatatatataggcttacaagaggaggaaaccctatggctggtaagggaaggccccagagggaaaccttctaggaggaaaggctccataaggaaaccgcctagaaggaagggcagccactctagaaggcaggctagcagcacagggaaaacctcctatagagggggatggcgcagcatccctaggtcgggtctgtgcataagcatatgacagcccggccccactcacaccaaaggcctaatacaagaattctaacagggtggtctgggcatttccagcataaaagaacttgctggggtttaacagtatcatcatcttgggggcttggtgtttatggcttcatcgtaataaggcggtttttgatggtgtcagaccttcaattaatggaataaagacagttttttttggatgaagttgagtgctggaggcttgccggtgctagacatcttgaggctttgggtcctggtgctgtaatttttaggtcaagggttcttttgggtgattagtgaagaggaggtgtgtgtggtctgctggcactttttgctgtttggtttccttttgtgtgcagttttcatgcgcataagga

SEQ ID NO: 8148 - DNA, 811 bp, Zea mays
tgcatgcctgcagccatgtgcgtcgatggaacacggattcgtttcgtgtgttctgacacacaaagaaagcaatcaatcaaggtgcaatcgaccatcatacctggccctaatcaccaccctccgtcctgtgattaattaataatatataactaaaaattcttgctcctgaggatagccacgccgcgcgcgcgcgcctagctagctctttctctagctatttaagcacgtacgtacgggccttccagacgtacgacacgccttgtgcatctcattccacacaagctcaggaaacgtacgtacccgatcaggccattccgcacagccacgccggcctcacccgctccttctcacgaacacacacctcgccattccctgcatcgacgacgtgctccatgtacatggatacgtcgtccagatccctcgtcttgtgcacactagtcctcgcagcctgccatgggctcgcggccgcaggctggtctcagggcaccgcgacgttctacggcgacgccgacggctccggcacgatgggtaacatatatatacatacatttgcatgcatatatatggtgttaattgcacattttatgtaggggtgacgctactccacgtgtagctagcacacaccaatgcaagtaatccaaaacgcacgcatatatactatacgcaggtggcgcgtgcgggtacggcaacctgtacaacgcgggctacggcatcaacaacgcggcgctgagccagaccctgttcaacgacggcgcgtcgtgcgggcagtgctacctcatcacctgcgacgcgtcacggcccggcgggcagt

SEQ ID NO: 8149 - DNA, 863 bp, Zea mays
aacctaaaacctacctggctgcccctcttataggcttccttggcaaaattggtattgtctctgctaattgaaccttcatggcatcaatggaagcaatcgaaacatgctagcatatgtaaatgttaggtggtagcaggttctaccatatttctgcgcattctcagctaaatatgcatggatgtgaacttggatatatctcctgtcatgtcattgattaccttttctctctctttttttttcagccacgacattaactgggcttcattttgtgaccactaccttgatgactatcgtatttcgatggttaggcctgagccagccatcccacttacccctagcagatctagttaaatttgtgatattttcgaacttgtcaattgttgggatgaatgtgagcttgatgtggaactctgtgggcttttatcaggttggtgaaatttttagtagctgctataatatgcaaccttaaactgttaacaactgaattcattctattcccttgctcagatagcaaagctgtgcatgatacctgcatcctgtcttctggaggttgtctttgatcatgtacattattcccgggacacaaagctgagcataatggttgtgcttataggagttgcagtctgcacagttactgatgtcagtgtgaatgcaagaggtctaatcgcggctgttatagctgtttggagcacagctttgcaacaatatgtaagttttagcaccttcatatgcagattccttatacatcaccaaagcagtaagattgcttgctacctccttctatttgcaattagcagcaagtttgttggcggacaatttgagacttctcaaaggacaatgtggcgctgcaggcatgcaagatg

SEQ ID NO: 8150 - DNA, 900 bp, Zea mays
gctctacagtcgacctgcagatactagtactacgagcatattaattggttactgccttagatcactaagttgttagaagtaaagtgaaatctggcattataaggctatctccagtagatctcctattccaccccttatctcatcccctatttcgaacttctctatacaaagagtgtcaaacaatgtcatcttcagttacgtgttccctattttacacattctactggagacagtctaaacttctaagaatagaactaaacatattaacaaactgctatcgtgggcagatgatcggaagggggggggaaacattgcatattatatagtaagggcaaactgtatccccatcagatgcccatagccccacatactaacaagcaattgatgggccatccttagggctagataaccaaattatagcggccatcagtacaatatgtaggcacataaaagcagctccaataaatatgtataattatactacctaaattctaaatttagcaagtcctcaagtgatacaggaagcaaaaaaacgcatcttctccaacatttctctatatattactttctgaatatgttaaaacttgtcatgtcacctgtttgagttgaagcacccaatttttttccttttgttttcgtatcccttccgcaactcaatctaaaaattgtgacctagttagcgacgacatattcaacctggtgagttgtgttggtcttttgatttgctgccacagttgtttatttgtttattcctgacctgtgcatgtgcgggtgttgcattgtcaattgtttagtctctagctgactagctgccgcaattgtgcatcaccgtcggccggcgcacgagctctgttaatctatctttgctgcagatcgactctaggggatcccggaaacgag

SEQ ID NO: 8151 - DNA, 829 bp, Zea mays
ttgatagcggtgttactcatttctttcgtctctctaccaatggattctattctgcaaagtcggcatatcagagctttttcattggatcagttgagtttaggcacccctaaatgtactatgattctactatataataatttataaaacgctcttcagctcgctcctttatggaaggcacaaatccttgccgtcgtgaggggcatgcgctcagaagattatatcaccggtgcagccaaatattcccaaacagaagatgaagcaaggtgataaggaggccataaatccgttgtatgaacaacggatggacacaaatcagcaggcccttcgaaaaagacatcacatgcggacatgcccatacgacgcaggtaatgagaggacaactaaagcccattcgaacatgcgaaaagacatcacatgcccatacagccatactgggctgggaacgaggggacgaagtaataaagcccattgtgccatgcgaaacgagtcatacgcagctgggccataatttgaggtgtagcgtacgttgtacaatacctaggaaaatacggtaaacagcggcccaaaaaggtttctcttctctgtctgtctgtctgtccgccgtccggtccggtgtacctgaggcttttatttagtaccctgagctccccatgtgctcgtaataatttagtaacaggggggtgaagcaaaagttttcgaaaatcattggcagccagttcggcagcacaagagaccgacgaaagaacacgtcgtcgatggcagtactgcatcttaggaaaagcatactgattttaataatctgggaccgatcggttatgacttggcagaa

SEQ ID NO: 8152 - DNA, 870 bp, Zea mays
ggtgcctgcagacgccgtcgccggcgccgtacctggtggcggagatggacgcggacttcgagcggtcgacaacgcaaaacaacccgtccttcttccaccggcggtcgttccactctgggctcagccggagcatgcgggtggacggcgacctcctcgccggccctggccccggccccgccaggctcgagcgccggtacagcgtcaacgaccgcgtcatgtacggtagcaggcccagcgactacgaggccaactgccagtggggcgccggtcagttggtcgatgaggacgacggtggcggcggcgagtccccggtcacggtgttctctccgatgtcccacggatatggaaatgctcctccgcctatggaagaatgcaacgggtcagcccgtggccttgctaggtacatgctgccattataaattaattcgatcatgtggccttccttattggaaaagtgcagtttcgcttccaaacttttcaaatactgttcgtaaaacatatgccatttccatgaaattatgttcgtttttgtttgttaaaattttcatgactaggtactgcctggttgcgagcaagcagatggttggactgttcctgatgatctgggctcggaaagagatgaagaacgacattaggaatctgaaggtgtcctgcgttgggaggggattaatgggctaccttggaaataaggtgaattttactccaccgcgatcagtctcgaacaatgcaggcttacacaagcaaccggcaagaaagatttcatttggtctagacgtatttggatcgaatccaatgaggagatcttgtgtgtgtgtgtgtgtgtcttgcagggctcaatctccatcagcatggctttgcacaaaacgagac

SEQ ID NO: 8153 - DNA, 799 bp, Zea mays
tccacctttataccgcttaaattttcagccaagcttccagatacagaaagagcttccttgctttgtccaattttccacaatgccagagcatatatctgcaatccatcaacgctcaacagtcctaacaaaattaggatgaattacttgttagtttatatgttatatatgcatgtggaaaatattttgaaagggtctgctgtcaatactatctgccaaattagggaacagaactcttccattgctcaagtgaaataaaaacaatataccttgacatctcagctcttcacactcccgcgctgcatcacttgcaagaccagcctgcaattagttcaatgattagcatagttgttaaggcggtaaggcgactgaccccctttttaccttttaagcagtaaagcgtaaggcgaggcaacgccttaaatatatttaaaaatagaaaagtattgatatttaagaaattgtttagggcaaaactattaataaagaagagaaaaaggataaagaaaagaaaaagggtaactcagccagcccaaattagtccacctggcccattaaaattagggtaagcccacttattcacccccctcttattctcttctcccagccgcacagctcccccttctcttctcccagccacacagctccctctctctccagcaccagccacctccggcctccctcccctctcctagcgctctctctcccagcaccagcgcctccctccctctccccgcttctccctgtctctctaccagcagccgacgtcgcgcagccctccgccccgtcatcgtgtcgccct

SEQ ID NO: 8154 - DNA, 816 bp, Zea mays
ggggtaccctagtttctttataaggccataaaggaattttgttctccgctataatgaaaaagagagaaaagaaataggaaatctccatttccctgtggtcatttcatttgatttggcagccactgagcagtgaccaccagcagctgacacgaggacacaacagagataaggcccgctccgcccgcagtcgtccccagctcgcgcgacatggcgcccgccgcccggtggtccacgtcccctgtgctcttcctcctcctgctgctcgcggcggccacggcgacgacgaccactacggcaaaggatgggcatccgtcgccgacgccgtggccggagcgtttccacgcggtgctgttcacgaacctgaccaactacacggaagcctccacgggcccgccgctgcgcgtgacggacctctactacgactggccgcggcggcggaacctgaacctggtgcggcaccagctgtcggccgacccgctgtacgacgtggagtggaacaacggcaccggcttctacttcgactccaaggcgtgccgcgtggagcagttccccgtgggcgtgctgccgccgtggtggctctccggcggcggcgccgagtacgtgggccgccgcgtcgcgggcgggatcgactgccacgtgtggggcaaggccggcttcatcttctactacgaggaggcgcgcacggggcggcccgtgcgctgggacttcgtcgacggtactgtactgtacactgtactgcaacgattttttatttatttatttttaggattgatttgtttgccatgaatgagtatatctgcactgcaggcatgcaag

SEQ ID NO: 8155 - DNA, 805 bp, Zea mays
atcttctagagtcgacctgaaacgttaaaaataaggggtacctagctcgaaacagtagccgagccgagtgttaagccgaaatagctgaacaacgagccagacggagccgagccagacggagccgatatccaaccctccatctaaccagtggtaatggtggttttggtcagtgtgttggtcgcctgcgccaaattccgctgcccggcggcgaatttactcctctcagcctctacttctcgggttcgagctcaacccggcggaccactgctgcggcgaaggtcagctcttgaaaaaaatgttccacttcttctggttcttcctcctgttttctcgtctctccgatgacatctcagagttgggttagtttacgatgctcgtctgccttgtcatgtatacatacaatatttgagtagtcatggaagaatcttgcatttgaaggtctgcttattttatctggattactaggttcagttttgtcatgtgggtgacgctgatctaatccctttgactgcacaggactagcaaggtttcattacgctcaattgctatggctaccacacaaacctcagaagcagctgctgacaaaggattgcctctggcagtggacgctaccatggttgatgagtatgcctcccagtcaaagttgctgcaagaatttgttaaaatcccaactattggcaaggcttggatcttcaattccaaggatggtatgcgctgtcgttgctactctctctctctctctctctctctctctctctctccttttctttcatgaaatttagttttcttgtcgttgttcgggggt

SEQ ID NO: 8156 - DNA, 813 bp, Zea mays
attgccagcatccgaagacggccgacgatttcctcaagctgagccccagccccaaggtctgccttcctttgctgttcttgagttctcgcggcccttttttcttccacgggttagctgaaccctcatctcacgcctcttcttcatcggaacagggcatgctgctgcgatcggtttcggccatgctgccgttcgtggaaagggacgccaatgccagtagcctcaggtgaccaatcaaattcagttgttctttgcgcgccgcgcccgtttcgatcaaatcaggttctcacccccttcgtgcgttgctcagggacggcagtggcaatctcaactggcggggcggcggcgccgttaccgcctccacgccgccgaagccaaaggcagcgcccaagaagaggttccaggaggacagcgagaaccaggacccttcgctggccacaccgcccccacggcaggggccaagtaggccgccgttcggtgcccctcggtggaacaagcatgccaaggagaccatcaagtccagtgcggagaagcggccggacaatgctgagaaggaggcgctgctcaacaagcacgccccgccgaggcagctcaagagcactctctcagcgaggaatctcttctctggaaaggatatacttggacagatttcggagttctacgatgagctgaagcggatggttggcggcagccggcccgttacagacacacaggaggaatacagcttaaacccgatgtaagtatgtaactcttgcctcgtcgatggaatgcatgaattcaattgtcggattgtcgatatgatgcccctgacagttt

SEQ ID NO: 8157 - DNA, 851 bp, Zea mays
tgttggtcatgaaactccatcctgtaggccggcgccgcagaggtccggttcggtgagctgaagggcagagttccggcaccgtgtcgcttggcgtcggccgccaatgggacctggcatatccccgcggctggagccggagctggagatggagctggtgcgttcgactggctggtgatcagggaggactgggacggcgagggcggctggtcgtccgtcaggttgaccgtggtgatgtcgtggatgctggacctcctcttgtccttgccgccggagttgagcctgatgaagtacttctgcgcgtggctggccacctgggtgggcgttctggtctggacaaagttgcgcgaaatgttcctccagtcacccttgccgtatttcttcaggcctaggaggaacaacctggccgaagaacagaaacgtgatgatcttgttcagtaactgactgtttaagagagccagatctctactcaataaagaaaatcgaaaattcccctccggattaaatgcaattaaatgttgatagttgattaactgcaagttgcaaatctacacaggtgatgtaagccctatggatggaatgatggtgagatactgagattcaactatccgccgagatggaagctctcgctagtcatccgcatgacgcagagcaatcgctttctcagaacagaacggaacgcggaagtcgtatcgtatggcgtatatactcactcacctgtgctcctcctccgtccatggcacgcccttcttccgctcctgctccggcgtgcggccgtggtgccgcctcccgcagcctccggcgaagcggtacccgtgcctgaagtcccccggaccggggccgtagccgtccc

SEQ ID NO: 8158 - DNA, 1097 bp, Zea mays
ggcctcgacaatccatgtgatgtcaggtgctaccttagaacagggggggtactcgcggccaaaatgtcgtttatgtgtgtatgtgtagatgtagtggcggccggccggagtaaattgtcaccagcaaatataatgaagatcgatcgatcgacctgccatttatacaaggaacaattggatctataccattaaaagatccaaactttagatatataccatgaaccccacatgtcattgactcatgtggacccacatgtaagtgagatagtaatggtatggatccaaagtggtgatcttttaatggtatggatccaaatttccctttatacaatatccaaagtactcaattaattactactactacgaaatctcacctacagtaagtaattacgacaatctctttttttttttttttttgcagacccgcgtttgttaccctgtcctttcactcataagtatcgctcgcttccatttgcttccattgaggtataggccaccacgcggggtacgcagagagctgacacgtccacttgattgcgtgacgaggagaggtacctagctagctagctagacacctagggatgaccatgtccataatgggcaagtcaagtcaatgaagttctaacatgtactactggtgactgagcagtgacttcgagggccggggtcatttcagttttcataattcatgctcctcctctatcgaaatacatgtgcatttttattatccaagagtatttttaaaaaatttaactaaaaattaactaactgtattgtttttttatattcactatatgtaataactgtttgttatatagattatagaatatattcctataataaacttatttggaggcacacgtatcgacaatgtttttatgtaaatggttgatttttttaaaaaaactatagctgctacatgcatatatatatttaattgaccgtgtagcccgtttaatgatctatttagcatgagtaatggctaaagtgtaggtgaccgaactgcttaccgtttaccgtttagaaatatatttttttaattacagttattagaaacaaaattgggttctttaagaacaaatcataattttaaattt

SEQ ID NO: 8159 - DNA, 1070 bp, Zea mays
accgcactccgtactgtttgcatgttgcgctgctccttcgctaggccgactgcgaccgggagcgacgacgaaggaacggaggaggtcaggtattcgcgtgattgagcggagcaagacgaatttggaaactgcgggcgcggcagcggaaggcagggcagggcggcggctcccgggttctctcccgtgcggctggcgttgcggtagggaatatttgcctgcggtcggtgacgccagcagcagaccagactggatttgcctgtttgggccttgttggagaaaatgttattttgggcctacttttggactcctcgcttcaggagctcaacaaggctttgggcctcgggtgagatattgtcggaattcgagacgcgcacagaaactacgctgatctctccggaagccgtaacgctctctctccacgttcactttccaacacaacaggtataataataaatattctataatctttatctagttctggtaaaatcattaaacactacagatatttttttatacatatagatcattgcactaggtgccatagcccatagccaatctaaccgtccaagagatcggacaatttttttagtagtgctactggtactaggtcttccatcagcagaaaaagtcaggggatcagggtctcagctctcactgtcagggacatcgacccaggaaccaatggcacaagggccatcaggcatcaggcccgcctaatgcttcctcttgttcgccttccactgcttcactatgtaggctactgcctcgcccatcggtgctctccggtcctccttgaagttccacagctccggtatggggtacctgccgcttggattgtactcgttcatctcaagaagggccttgacgaccacatcgtgcgcctgcacacccagttcagccttcaaagcttgcagcttctcatcatcctcccgaattatttcctgcaccatcgagtgagtgttttagacacagcaagcaggccaagcatgcttcaccacaggttagctaagcatttcaagcaagagtcagcttcagacgggattttcctgtgacaagttctttttctgttt

SEQ ID NO: 8160 - DNA, 1174 bp, Zea mays
caagcttgcatgcctgcagtctgcatcggggtggcaagtggcatggcatgtggtttgctacatgcagagtgaactgtcgctagcatttcgaggcggacgcagcaggttccaggcaagcccatgcattaacgaaggcgccccttgagtgcacccaactctaccaaatccatctctaaaaccggagccatgcgcgctcatccgatcccgagaacgaacgtacatcgatctccccacggccaccgaccggccatcaccatcgtcagtcgtcaccagaccatggccctgctgccgccgcgtcgttccctgctgcttctgttggcgctcgcggtgcacgccgccgcggccgtgcagctgcacttctacgcgcggtcgtgcccccgcgccgaggccatcgtccggcgcgccgtccgccgccgcgccgcgctcgaccgctccgtgctccccgcgctcatccgcctgcatttccacgactgcttcgtcagggtacgtatgttggactggtcactggtgcacgctcccacattttcgtcgcctcggtctgattctgataatctgatgccgagtgtgcatggtttgtccttctaccaccacggcaccaccacccacaccagggatgcgatggctccgtgctcatcgacagcacgcccggccaccccgccgagaaggatgccccgccgaacctgacgctgcggatgctggacgtgatcgacgacgcccaaggcgtggggtcgagaagaacctggcccgggcgttggtggtcggggcgcccaaacattccgtggcggcctgggccctgcaaggtgaaccgcccccgggcgaactgggccgggtgaaaagaggggccggcacaccaaagggggccccctccgggggtaatgaagggcaactggcccccggtgtttcagtagcccaccctaagggtatagccctgaccttgcgccctttccaggtatatctcccgaacccaatgtcggtctttcgctccccccggcttaggtgggaggacccaccgcctgtcaggtttaccacttgggtttggcctggggctacatgggcagttttaaggtcaaccgctggaaccgccggccaggacccgctgtggcggttccggccggccccaccaaaaaattgccaaccgcgccaaaacaccgccatgccatgcgcaaaaacgacc

SEQ ID NO: 8161 - DNA, 1155 bp, Zea mays
cttgcatgcctgcagggaaatggtgcggcgcaattgaatgtatgtgtacaaaaagagagagattgttttctgacattactgcacgcgaagaaaaattcaacacaggtctagtagtactccggtagaagtaaacatctaggggtaccgtgataatgtgcttgaaagaaacatgactttggatcgtcgctgtcagaacaaaacaaatccagttctcgattaggaacaaaatagcaggccgggtcaggtttttcatcagtgcatgaacttcaagttcacgaatttcatttttagcatgaacgcatgtagaggttcatatttgatcgtgagatttattcagctagaggctcgcagagtaatgttaataataacattgtgactgcaaaggtaacttatgctaaagcaaattaatcgagtataatatctaggacagagaataaacatgttcacgtgccaacgaagatagcagacaaatcaacattcgtttagctcgtgagcattgatgttccagctcaccaaccattgtggagcgagaaatcgtgcaagtgctaatggatcatggtccaattcttttttgttagggctataaataaattttagtttaaaaataaatacaattagagtttgattctaatttgatatgattctaaaattttatagtataaatttagagatcattgttccctacctgtacttgtactgaggaaatgttaaaaaaactataaaaaatgcaaagttcgatgggatcaggtgggttgagagttgagacttgaaaataaaaaatacttctatttcagtagcaatatacaaagcatataaaatctccagaagatgatactcacagaaacgggcaatctgtatttacactatcccttgctccaccttttcacttctacattacaaaatctaatcgaggtacctgtgatttccatccaaacaattttgtagatatccaaatcctaaaagcaagcccaacttcacatcctccaacgatgatggaaaagaacaaaaaaaggaagagcaatgcgttgcaccagtgtcatgtgtccatgtccatcacctgcggcgcctccggtcggcggcgtactgcgagagcgggacgagctcggagagcggcgtggcgagcggcgtggcattgggcgtcgggacgggagagga

SEQ ID NO: 8162 - DNA, 1117 bp, Zea mays
cttgcatgcctgcagtattacactaaagaaaaactcatcctccagcgtatttctgtctttcttgataaataccaggcacgcttctattccgtgctcttccgtaacaaagggcaccaaccatagtagaagcgatgggtactcgtttccgtgaacaattttatgttgtagttccttgcctgcaaaaaggtgcttggcaaaagagttgaatggcatgtgacagcaaggtgtgccaccaagctctatgaatctcagaagctcactagcactgtctgcaaaccactcaaatcttctaacagcagatctgctggactcaaagctgttgcggccaaagccagagaaaataaaggatttggtagcatgtgctattcgtcttggaaagtaggaattcctaacctcctgttccatctgctcatcttcgaggatcatcttcttgtatttgtatagcgtgtcatcacactctttagcagctcgcttcagcttcttgcgccaacgcagcaatgacaaatcagtgacgtgccacttgctgcatgtttcaagagctgcctccagcttgatatgcgccatctcaagcctctccaagttatcatttggatttgagtcttctttgccctcgtagctgtgaaccagaccggatagaatttggctaactgtctcctggacaaccatagaactgaccatctcggtcattaggatccaataagtatttgtagcatcccttccctgttcagaaaaaaaaacacaattgtacatgaggagactaaacatatggacaaaatcttggacagaatcaaaagtgttccactgaggtgaggaacaatggatcaccagaaaatatttagcttactagctgtaaaggagcaaggacctaccctcaactgaagtgcaaggaagtgatgagtagttctcacaagtgtatataaagacattcttgagggaaatgtgaatgtgatgcccaacaacgggggtctggtagtgaccggtgcacatgagttggtgtgtgaaagaaaaatactgatgagtgactgtgtttctgacctaattaatgccgaaatgaacatccttttcgacttaacaatatgagaatctgccaggtggcacgtgaaaaaaaaaacaaatg

SEQ ID NO: 8163 - DNA, 1061 bp, Zea mays
  unsure (1)..(1061): unsure at all n locations
aggaatactcgtttctgatggctactaatcttgaatctgcatatcacttgtgccaaattgcacatcctcttttgaaattatctgggtcaggcagcattatattcatatcatctgttgctggagcgataggtatctttagtggaactatatatgctatgactaaaggtaacagccgtactcaatactaatcaaccttctatctcttggtcgtatatgcatgtggcatgtataaacagctaaaattcttgtttaggtgccattaaccagctaaccaagaatttagcttgtgaatgggctaaggacaacataagagccaactctgtcgctccgtggtacatcaccacttcacttacggaaggagtaagaatcttctattgtttcatattaacgacttaagtgtatcatattccctccattctaaattataggttgttgtgttttttctagatatatatctttttctacacacatgaatatacattatatctagatacatagtaaaagttatatatttaaaaactagaatgacttccaatttgaaatgaattatctcctatattataaccctcatccgttgtttcctctaactactgctttcttttgtgaagattttggcaaataagaactttgaggaacaagttgtgagtcgaactccgcttggacgtgtcggagaacctggagaagtatcggcacttgttgcttttctttgcatgccgggttccacttatattagcggccagacgattgcggtcgacggaggtatgactgtgaacgggttttaccctcccaagccctaggcggcagctgccatgtttctttgtgctgaggaaacgacaatagctgttgttcttggttgttgagaaaaaaaatctaataaaatgtatgtaaaggtaaggttgtcatgttgatactgttcattacattacataattctatcagggcaatgtgaagaacgttgtgtttagatctgaccggtgttagcaaccctgcaatgacgcgagctagctttgacagttaatttctgggattttttnttaaaacaatgctgcaggcacgcaaaa

SEQ ID NO: 8164 - DNA, 1139 bp, Zea mays
ttcttgcatgcctgcaggaataggatcttatcattatttccctgcggtccataaacacaagtaagccaccaggggctcccatttccattgagaaattggactgagacgctattattccggatatactgcgtgcctgtgacaaccacatcttgtttccaagccaccaaaatcccaccactggcgccaacagcaggtagctcgataaaattaagaaactcggagcctaaggctgataggaggacccctctggtaacgacatccaatttagtttcttgtaagcaaatgatatcaatttttgaggaagtaactaaagaacggactgagtcttgcctagccgaggaatttaatcctcttacattccatatcagaacacgatccggattcattgacacaagggcgatgagaacaacaaaaggaaaaacaaagcagatccaatcctagaccctacagttggtcaggaacctgccagccaaacaaggctgcaagggcttttacatgaatatcagacaaagatgtcttgaaaagatcagcatactcctcttgagccctctggtcaatccccacattatcagcaattataccaactgccttcatgattttcttgatagcacgtctgtcaaggtcagaggcattaaattcaacgcctacaccagcaactctgcggctgcgacgtggcaccgatctggagggcaatttgttgtccttcttcttcaagatgactggaggagcaggaagcaatttagaaggttgccgagtaacagatttaatgaacacttctctctgcaaagactgggaagtctcctgctcgccagaaggagaaggaagaagactgggagccaccccagctggagacatcagaatgtctgccacagccgcagtaggctcaaccaaactctcctgctcgccagaaggagaaggaagaagactgggagccaccccagctggagacatcagaatgtctgccacagccgcagtaggctcaaccaaactcaaaataggttcagaacgtgtaaaagttattgccgtggctggagacacaatagcatctgccacatccccgataatgactgggccctgaccaacgtgatctgtcccatcagcagccaaaccagtcgccgaagctggagaaattatagcat

SEQ ID NO: 8165 - DNA, 1237 bp, Zea mays
tcttgcatgcctgcaggatcgcggcagccagcgcgtcggtgaacttgggatccttggtgagcgagcgcgccatctgctccacgagcgccgtgcggaaatccggtgacgcgatctcctggcacagcctcttgaggccgggcacctcggcggcggcggcctcgagcccccgcacggcgccggctccgttcctggtgaggtccagcgtgatggccgggcccgaggagttgatggaggtggagctggggagctcgccggcgcgtgtcgggctcgggtggttgtgctcgccctcgtacgtggccaccagcacggcgctgtcctccgcgctcctctgcacctgttccgaggaacagagttattgtatcgaccattagcgacagagtgaaagaagtcgccgtgaatcaaatcaatgtcaggccggggatggacggatggtgggccaggagtctaccttcttcttgacggggcaggatggtgcgtatgcgcagcggaagtaggctctcggggacgggttgtcgcgcgtcaccttctggccgtacttgcgccactggtagccgtctttgacggcgagcgtggtgtcggaggggtcgatcttggtgcagaccctggtgagcttgatccgcctgcacgtgccctcgtcgctgagggcggcgctctcgacggcagcgttggcgtcgctcgaattcgacggctccaggctgtccctgctcctcttcctgccgtcgggactccgctgcgcggcgacctggctggcgtacatgtaggcgatgatctcggtgagacgccggttctcctcgctgacctgggtgagcctggcctccagggtcttggcctgtcatcatcacacagcattgtggccaccgatgccgatagattttcaggatttcagggacgacgacgacgccgatagattgtggaaaccgagcggcgaggaaatggtcgtcggtcagttagttacctcctcctgcccgtcagccagggacgatgtccgtggcccccagcagccagtggcggggcggtcgagtctctcagcgtcagctgtcgtttccgggccgctccccggcgacggcggcgaaaggccgacgctgaggtccaagcagaccggggagcagtcaccgcggctccccgagtccatgagcagcatcatgacctgcgtgtgtctcagcgtctgtgtctccgcgtaagcgagcgtgcagctgtagagctcgattgctcgagggggacaggaacaggatgggct

SEQ ID NO: 8166 - DNA, 1050 bp, Zea mays
tttgtactggtctattttggacccttctctatcttcttaacttaataggacgcacgagcgacaaaattccaccaacaggaccgtagaggaaacaggaatgttgaaagggcataaagggaaggtagatgaaaaaggaccaagggttggctcatggcacaaagtgggagggttggcccatgttacctgttggtggtgacagggttggctcatggcacaaagtgattgcgtgatgtcaaggaaaacagtattccataattgtctggtctacttttgatcgaaaggtagagccaaagaattgcactctgaaagttaaacttcacaggcaagcaaaatcaagactcaaccagcaacaaacactgaaagaaagtaataacaataatgttatattaactcaaaattattaatatagttaagccgcatttcactatctctgagatagaatagtgggttggctcagtaggaaaagaaaaagaacatcgggtacaaaatatgatgaacctgcaatggataatttaatcaaatgtattattacttagcactttagctgagtggacaacaaaaaattacctcaatttctcagggctttcctccttacaagtctataccctatgaggttatgacactgaagtttagcaagattcttcaacatgcaattcttttggaccaggcatatttcaggtttcataacatgagcctctaacttatactcttattgctaattaatacagataggtgattgtgattcaatcaactatcatcatcatgccctaggtgaaaaaacaaacatgaatggcaacaataatgtcatgtgagaagcataaccagcatctatcactaccaaccagtactaagtttagtgatgcagctatatgtctaggagtgtgtcactaatcagtgctaccctccagatcaggtgaaaattcacagttaacaaattgacactggctaagaacatcgggattgcaacatgaaacagaaagggaagaaatggcacgcaccgctgccgctggtcatttgtagactccctgaactcaatgtccctctgtcgct

SEQ ID NO: 8167 - DNA, 760 bp, Zea mays
  unsure (1)..(760): unsure at all n locations
agtggcggcggcggggaggcgttcgtggacacgttcgtcgacggcaagcggccgctggcgctggtgatgggctcccggccgtacaccaggggcatgtgcgagggcgtcgagtacgcgctgcgctccatgagggccggcggcaagcggcgggtggtcgtcccgccgggcctcgggttcggcgacgacggcgccgacttcggggaggagcacgtccaggtcccacccggcgcgacgctcgagtacatcgtgcaggtcgacagggtgtccatcgcgccggcgtgaggcggcagtagatagatcgcagtcctgtggtgttctgatctttattttatggctcggctcggttctttctgtactggcagtctgacactcggtagcgtgaccacaattgttctagctgccatgagccatgggacaagttcattctcgttttttcaagcaagatctcccaaaagagcagagagatttctgagcttgcaaaccaagctcgttttgagcttccgcactcgtacgccgtgaactggtcacattctcggtttatttttaattactttcgttcttccaaatttattgccttcaagcccttttgtttccctgaacccctgcccccaaggcctaaccaacacacacataatgacataaacaagagtttaaaaaggctaattccttattactaacccgagaaatgtanaaataccaaaaaatacattgccataaccaaaatccttaccaaatttggggaccactttattaatcgggc

SEQ ID NO: 8168 - DNA, 1189 bp, Zea mays
gtccctcggatccttttagtcgacctgcagatacctctgatcatcatgcttctgcacattataagaaagagccatcatctactaatggagataatgattatacaaaggtaaagaaaaagctttagtatacatttcgtctgaaagcagaaaacgattgttgatttctggtcattatccattttgcaggtgctatgttcagttcgttgtgtttttgttaccccaaagcgaaaattagcaggacaactggatatcacacgaactgtcatgcatttttcttttgaatttttggttgaaggaactggaggatcatctgtttttagcaagtttaaagacaaaaaagattcagactgcaagaacgagctgggaagtgtggacagacttgacggatgccgagacagtatgattgaaaccaatggtgttttgatgcaaaaccagtctaacaagatcaaacgtcacaaaaggtggaacataactaaggtatctctctcccctagtctttcctctcacttgctcactctcttaatctccttccatacatgtttacagataaaaggagttcattggacacgctacctactgcaatatactgcaatggagatcttctttgatgattcaactgcacctatatttttaaacttttcttcccaaaaggatactaaaaatgctgggactttgttagtttctcttaggaatgaagctttgttccctaaaggaagtaccaaagacaaaaataatatcatttcattcgtggacaggcgagttggacttgaaatggctgagaatgccagggaaagatggaaaaggagggaaatcagtaactttgagtatcttgtgattttaaatacccttgctggaagatcttacaatgacttaactcagtatcctatatttccatgggtattggctgattacacctctgaaaagcttgatttcaacaagtcatcgactttcagggatctttcaaaaccagttggtgcgttggatgaaaaccgcttcaaggtgcagctactattgtgtacttatttgtaattgtaggctatcatcaccttatcataacttcacgttagtaatgcattattgggcaggtttttgaagatagatatcttagtttctgtgaccctgatataccaaggttgaacctttattcatttgttagtgttctccttttttagtttactctttttgcaat

SEQ ID NO: 8169 - DNA, 1194 bp, Zea mays
gactcgatttgccacaactttcctcactttgagaagtctgtacaagcatagggatgctttgaaatctctatttcttagtgaagcatggactaggaacagactagcacaaacaaaagctggtgaggaggtgcataacattgtgctatctaccaagttttgaaatgaggttgaagattgcctaagagcttcagccccatttcttattgttcttagggtagttgatggtgatgagaagcccgcaatgtcagaggttgcagcacttatgaatcatgcaaaagagaagatcaagcttagctttgcaatccaaaccaagaaaaccttgctcaagagtcaagaaaatcatagatattattgagaaacattgggtgaagcaaatggaccatcctttgtatgctagcatgttaagtattatgtttatttgttgtttacccattttttcagatccatacaaaaaaaaaaagaaataggctgctcagctgctgcataagaggttgaatgatattgtctttgtttcctacaaccgaaagatgaagactaggtttcaaataaggcgtgagaagaaagggaaaagttttgaccctttggtcattgaagagtttaattgggacaatgagtgggctgactcatcacatgtacaccctcaaggtactcgtgggtgtgagtgtgtccagaatggtcttacatgggaagttattgatggacctcttggtgcatcaagctcactctgaggccgcaatttttcaaggaatgctagcagagggtgtgcaagaaattcaaatccaagcttggttgaagatgaatcaaatttaagcagtgaggaagaagatcgagatccacatgatgatgcttatgtgactgattgtgatgatgcttccattcccaatgatgctaatgatggtggtgaaaacatgcaagctgcaaacaaccatgatgagtttgaagatggatattgagatatttgatatttcagtttcaacagtgcctttgttttgtgttgctttgttgtgcatgagtggttgtgtggaatctgtggactgcttatccttatggtggactgtttgcaatattgttaagtggctgtgtggacggcttatgccactagtatctaagtgtgtggactgctacaataatgaactaatgatgctattcatgctgtatttttttaaccagtcatgctcctatttctccatgttt

SEQ ID NO: 8170 - DNA, 1191 bp, Zea mays
tactgtgcgcctcgcctggcgcggtgaagagcctccagaacccactctccaccatcggctcctcctcctcctcctcgtcagtgccagtggtcgggagccgtgtgaggccggacttgaagttgtccacccactcgccgcacgtggcggtgccgcggaacgcgaccacgacgtcgcggcggccgagccgctcgatctcgctctcgtcgtcgcacaccgccacgaagccgatgtagctggagccgcagggcggcaacgacggaagccacccgggcaccgaggtggacgcggcgtggaggaggcgggtgacccggtaccccgtgcccggcatcccggcgcggcgcagaagggagcggctcgggaaccggcaggagccgtaggacggcgcgccgccgtcgaagtcgaagctcgcgtaggccgcgcgcacgaactccccgtaccggaccagctcgcctcgtagcgcgccgtccagcgggctcagcaagccgtcccagtcgcgcgcgccctggagctccgcccacttgcttccgatccgctgcgccgagggcgtggacgccggcgtgcagggcgcgaaggagctcctggtgacggtgcagccgctggtggcgccgccggccgccgcgcgccattgggacgctagggtagcaggtgcgggatccggagatagccgccgccgccgccgccatttgtgctctgatcgatcgagcttgctgactgatcagctgtgtgactgtgactgtgagcaacagaagcttgttgtgtggcgcgatatatataaaactggcgggaacgaggaaacacatggctgggaggagttgcttgcgatttgaaaccggcgaaacggcgggaagaaaggaagctggcgtgcacaggcaagcagcgcgtgtgcctttcgtctccaatgctcctcctgcttgcgtatttcaggtaaggatgagctgctgtccatggccgtcgtcgagttccagttcggctgcaccaggagcctagctagttagctccctgaattctggttacaaaagttgatcggccgaaccacccgaaagcatgcggctcgtctcggttcgcgtgtgcctgcatatatatgcatgtacacgtatatgtatgtgtgtgtaaaatgccagcatgttttttttttggtgaagtattgtatataacggaacattttgcacgagtttgtgtagtttggtgtga

SEQ ID NO: 8171 - DNA, 1107 bp, Zea mays
tcggtacctcggggcatccctctagaagttcgaccctgcaggtgaaaaaaatattatatcacacccttcaagtagaaataatagagacatcaagccgtgattagcttggactacctgtaagttctagggcttgtttgactgcacataaatccaacccccaatccacatggtttaggagggattgatgtagaaaatcgacttaaatttccacctcaatcgtcccaagccatatggattggggtagatttgtgtgcagccaaacaaggccctactgcactattgattttataaatcaggtacaccataacatacttcagattctaaagttagtttcaatcttcagtcaggtacataatactgttcatccttttaaaatgcatcaactgcctagtctgcttttcatgaagatgacaaactatatgtccaggcatggcctacatgcaattaggtatgattgaaatggtagaaataccttgagtatagggcagataaaatggcttggtggtgcagttgggatgggctgcaccgaatgatacacagtgctggcaagattgttcagccgctctaaaactacaagaaccttagacttcaggtcaggtcgatccttgcttcgcatttccaaacaacggaggccaagctgagttagctcatgcgcttctcgcacaggccaatttcctgcacgttggtccagaatgtcaataaggtgatcctcttccattgctcgctcagcagtgtctgctagcccaattggtgactttgcagtcagaagctgcaagaacaccatgcccaaagcgtatacatcagattttgctgaaacttgacctgtcctctgatactctgggtccagataaaacagtgtaccaactagatctgttgattttcgaattgtatgtgttgacgaagtgtcccttaatggaagaaatgttgcaaggcctgcatcaccgattttgctagtgaaatttctgtcaaggagtatatttgcaggcttgaggtcacggtggataattggctttggttttgaactgtgtaggaagataagtgccaatgttatttcccatgcaatacggaaacggtggtaccatgggagtggggcagtgtctcctttgc

SEQ ID NO: 8172 - DNA, 1193 bp, Zea mays
cagcttgcatgcctgcagaatggtaactgaagtaccatgtaacgtagctcttggtcatccagcacgccataaatagcccatcttgaccaggactcgagcacaataccgtcatagcccttatccctattaactggcagacagaagtcaggccatcataaagcatacgtttatttggaatgagactgtgcatgaatttacctgcattcactcactattatatcgatagcttttgccttttgcttcttttcgaatagtaaaaacagcaggaagtgcttccaagacaattctcggcactacctggaagacaagaatgaaagccaaagctcttaattgcgaaaaacattcatttccccctactgtgtactatgcagacaatatataaaagtagaaaagatcgctaaccaatcattttaccccacagctaagctaactgcttgaagtagcggcggcggtggtcgagcgcgggttgaggcggcagcaatggctaggaatcaaataaataattgtgcaacgatgaatgaagaatgctgaacattaaaaaaagacacacctccgggagactaatgccagcttcccaaccatgtgatgggcctgaaaatgaccgccctgaattctcaagatgaatgaagaatgtgcttgtgtaagcctgctttaacagctgcatgtgcatagcaacagttgttcacagaagcttttcgtagatttgtcaacagtgctggtgtacaattggggtattttctgtaaaagtaataagttaagatgtagtccaatacagcatctccgagaaattcaagcctctgcacacaggcacgaactttaagttgacccataaaaagccatctggagtaaaataccatttgtgttaaaagaagttcataaaagggctaataaaataataatctattatagttctacatatgaacttctcagattctttcctattggtaaacttttagacttcattcctgttggtattattcagccagctttaatagttctgaatggacaatttcatctatgttcttgcatgtcaagggtgcacaaaagaattgcaaaacattgttttttcctcagacacgcattagaagtaagaacggttcaataacatgccgattccatggctatggttagtttttctgttacattcacgccctttggattaactgaaaaactactgaactacccatctcaat

SEQ ID NO: 8173 - DNA, 1128 bp, Zea mays
agcttgcatgcctgcagcaggctctccagaagtcgctttggctccacaaggaccaagagtggtttttctagcctgtttgcatcgagtgcttatggactgggccgctatttcacctttgctgaaattcagaaagccacaaaaaactttgaagaaaaggatgtcattggtgtcggtggctttgggaaggtttatcttggtgttcttgaggatggtacaaagctagctatcaagagaggcaatccatcttctgatcaaggtatgaatgaattcttgactgaaattcaaatgttgtcaaagctgcgtcaccgccacctggtttcactcattggttgttgtgatgagaacaatgagatgatcctggtttatgagttcatgtcaaacggtccacttagggatcatctatatggtggtacaaacctaaagcctctatcttggaggcaacgcttggagattagcattggagcagcaaaaggcctgcattatcttcatacaggtgcagctcagggtataattcaccgtgatgtcaagactaccaacattctccttgatgaaaattttatggccaaggttgctgattttggcctatcaaaagctgctccatcccttgaacaaacccatgtcagcactgctgtcaaaggaagttttggctaccttgatccagagtacttcagacgtcaacaactaacagataaatcagatgtgtactcattcggggtggtactctttgaggtgctgtgtgcaaggccagccatcaatccagcacttccaagagaccaggtgaatctcgccgaatgggcccttacatggtaccgcaagggagagctcaataaaataattgatcctcacattgcaggtcaactcaggcctgattcactagagatgtttgctgaggctgctgaaaaatgccttgctgactatggagtcgaccgtccatcaatgggagatgttttgtggaaacttgaatttgccttgcaacttcaagaaaaaggtgatgttgttgatgaaaccggcaatgggataccaatgaagcacttcaatgactcggtgtatgatgacatagagaaatctagcagtgcagggccatctgttgaaggaagataacaatatgatcacatcaccaagatttgc

SEQ ID NO: 8174 - DNA, 1057 bp, Zea mays
gctagcttgcatgcctgcagattttctaactgtgccatcaaatgtgaaataatgcacctctgaatgtctatcagctttgctactatagttcttctagaaacaattgttttcttgatgaactatagaaacacaattgaattcagaaagactgaccattttagcagtaaatataccggactacgatgaagaggctgaaacctggttggatatttgataacatgctaagtaaaaagaatgcaatcattagatatttgataacatactagctaaacaatctcaaatgtaaccaaatttagagtaaaaaaactccctgtgtcagatattgtattaagaagaagacctttctacgtctagggcggctcaccttctaaaattgagtccaggaattaggcgtgtatagacagggattcaaggaagcatatcattcattatttgccagtaacatcctttgcaaaatatcatgccaaataggtaggacacgcccatgaccatgaacatgaaccattggagggttgcatcagtcaaggtgtgtggtcccagcattttattgcaccgacactgtccgagcttggcagcttgccatcggcccatcacaaaactgcattttacccccttccacatgaggttttctatctttcaagccaaaaggaaaagcaaaaaaaaatgctgggagcaaatggaggccctacaatatctcccccccataaccctccgcggtgccctttggccattgaccaaatcctgtccaccctccaactcctccatgaaggcgaaagaacaaacggggtgaatcatctcctgtgccagactgccagtgcgtgacgggggagataaaagagggcaacagctcaaaaggagagccttttggtcttttccccccgcttctactgcaaacaaccatcatgggcgggcaaagctgcccctgcccagatcaatgatagagtgggcgacagtcagagacggcacagcgaatttgatacggcgacagggggaatactggggtatatatatatatccactgttatagtgttataaggaaggtgattccaggattttt

SEQ ID NO: 8175 - DNA, 1117 bp, Zea mays
atccttttatttttatattttttttttgcctttgttctttttcctcagctttagttgacagcagagagatcacagacgctaaaaaagaacgcaaaggaacaaaagaagctctctcactcagcccggcatcccttttctctgcgcaaaggtgttcaccctagctttgtcaacctacgcttttgtttttgttttttttagtaaaactcattcgtgctcctccccgtccctcatcttgcgaggagtaaaaaaaaaaccggtaacaatctcgtgttcccagtagttcctgctgactttgattctgacaccacctgtgaaagaagaaagaaaaatgtgcagcagtgccaagtaaaaacagccaagaactcgtcatccatcccccgccagtccagccactgaccctctctcttcattctccaaccaaaatttgaggagagccatgcaggggacacagtactgtttgtgtgactaatacaatctcacaagtacatagacctggttatagcctgctttggtatttggtaattgtggtagaatatgggcggcgtacactatactgtacagtgtacaataaccagtgcatgacacagagcacaagtctctccacagagaagctggagctgtacagtgtactgtggagtgaggtgagcacaagacaaaccctggaatcattcatcatccagccactgagccagcctccaagacaagggcccacctgcctagacggctagacccaccaccacacacccccacccattctgttttcttggatccctccctgccacactgccggtgccgctgctactggccagtggccactgccattgcttgcccttgcccataaattttttcaaacccctgacgctgcctccccacatcttcttcttctccccaaattcgcccggcccgtcgtcgggagcaaggcagcaagcaatgtgccccagagccacggaccagctctgcggcgccgcgatggctagcgtgtgttcgttggtggaggaggagtacatcgacctggatctcagttcgtgcggggagctggagttccgggtgcgccggagcggcgcgtcggacgagctcctctgccgcggtagtaggctgcagaacgactgtacgggat

SEQ ID NO: 8176 - DNA, 1157 bp, Zea mays
tagaaaaaaagtgaggtactccaacactgtttattttctcattcattctacattaagattaactgcaatcaatttttagaataccatgatgggcagattaatcatgtgacggggcacaaaattcatcttaatacacattgaaagggccaatctatctcctatcttaaaaagttccatgtgcagacaaaacatttgtttatataggaaattattaagacatttcttaccttgattatcagatctgtcacggaaactgataaaagtcttgccatgcttgatgtaaccagccatttcccttttcctgtagagcgaggctttgctgactttcgtatctttttattttcagaagatgatctagttacaatttcgagatcatttataagcaattgcaacttcgggtcttttgagataacaccaaaacttagtttgactagagacttgcggaaacttagttttatttcaccaatcgaaacagattcaactgaaccctgagaagttgggtagtgtgagcagatggattagtaataaaggaataaaattgaaggagaaatataactaaatacataaatattcaacataacacagataatgtgagtcttaagaacatcaatatttcataacagaaagaaatgttatggtcagggtctccttatctactgtgaaagcagaaaaataaaaaaaacatgaaaaacaacacctccattataaaacaataagtactttaacagataaaatatatatagctgcaagatagtgtactaaatgtcaaagtaatattaagatgcttcccaatcatatcaagaagtgcaagtcatcttttttttggctttaaatagtactattagcagtttggcagttgtaagatgcaaagggcaccaaaccaaaatgttactaaattgagaaaacaagcgtggacaatcattaacttcttatagctctaggaccttgcagcatcagatgaaagacaaaccttacagaactttattgttacatccctcaaacagttgaaaccagcaactcgaaatccgacagaagcagagaatacacggctcaagaaccaagctaacaatcttgaagcaaacctgcaaacgataagccacataccagtgcagcattagttggacctttggatgattacttcctgcaggcatgcaaga

SEQ ID NO: 8177 - DNA, 1101 bp, Zea mays
atatttgaatacacgtgtatatcctgatcgtgcaccgttcttatttatcttcgttgcctccagaatcggaagcagctgtcttgttgatcgaggagcgcggaatctgcaaactggcccttcagtgttttggatgtgctgcggaaacgtgttatgatgtgtatataaaaaacgtagcatgtgctgcatgaactcctgtaggatgtctaactactgaagtgcagattcagcctcaactagtctactcgaactgacgaatactgtctgaacatgtggctactgcttgaacatgacatgttgccatctgttggattgtgcttctgtacgcctcaacttgtctgttgcacttccgacttccgagtctgtgagaagttctgcccgttaccaggtttcgtgcatggttctaggtttcagaagtgagtggtaggaccgtcaccggtgtcgtaccttaatgttctgcattctaattgaaaaccatttgtgaaggctacttgattatagcatgattcgttaaactgtaaccggaaccagcgaattacaccacctgaagtccagaaaggagcaaccagcatgcaaagctgtttgtacgcgagatgcatgcaagggacggatagacagtataataacaaccggaaattcacgtcgatcagctagtcactgcctttgcagggtaatcgaacggcagtggctgcacgtcgtcactgagcgaactggcgtgccggaaaccgtacgccctcagcacctggtcgtcggcgaagttgagcgcgcggcgcatgccctggtcgcagctgtccccggagtagtgctcgttgcgctgcccactgcacggctgacaccccgtgaagtgcgtcacgaacgggcggcgccacccgtgcaccccggtctccgccagcccggccccgcccagggcggcgttccttgccaccgcgtactccgcgtgctccctctccgcgtgccgcctccgcagcgcggcagctcccggccgccgctccatcgcctcgtacctctccgtcatgttggcgagccgccccacgatctccatccagtagccctcgaagtagtagccgctctccaggaacaccttgtcccgccaccggctgccct

SEQ ID NO: 8178 - DNA, 1156 bp, Zea mays
cttgctgtgctggagcagacttgtgggattcacgcccatgcggtggtagttgggcttgatggaaatgtggctgttgggaccgccctggtggatgcttatggtaaggctggagatgtggatgatgcagtcaaggtttttgaggggttgggtggtgaccgaaacctgattacatggaacgcggtgctttctgctcatgctcagcagggagatgtgcaggaggtcactggactgtttaaccagatgatggagctgggttttgcccctgatgggctaacattccttgctgttctcacgtcatgtagtaatgccggagcagccactgaagccaagttttggttggaagcaatgcagtcgaagtacggtgtgaagcctgaccttgagcattatacttgcgtggtgggtgcaatggcacgggtggggcatctagaggatgcagagagttttgcttgtacaatgccatgcaaaccagatgcagcagtgtggcggacacttctaatgggctgtgtggttcaccgcaaggttgacatggcagaatccatgggacagaggcttctggagattaatcccaaggatgactcagcttatgtcatgcttgccaacgtctactcaacagctgggaaaacaaatgaggaggctgaggcatggactgcaatgagggaccatggggtcaggaaggaaggtggcaggagttggattgaggtcagagggctggtacatgtttttgttgcaaacgaaagaaggcatgaacagctgctagaaatatatgacaaactgcatgaattgattcaagaggtagagaagttagggtacaaggagacagatgaggggtttgggcatcatagtgaaagattggcccttgcatatgggttgatcagtggtgctgcaccatcaggaaaggtgttgagaatagttaagaatttgagaatatgtgctcattgtcatgaattcttcaagtatgctagcatggtgatcgacagagtaattgtagtacgggatgtcaataggtaccacacaattaagaaaggtgattgcagttgcagaggctgctggtgaaacacatatatcttgaggataaactatgaggcaagaagcatctgtatgatttgccgataatccacgagataattgactccaggaaaagaactcgctgaattgg

SEQ ID NO: 8179 - DNA, 1112 bp, Zea mays
tcaccatccatcggccccaccaggcaccgtccacgtggacgcatcgacacgtgtccctatccgacctttgagggcaacacgtgtgcccgcactcctataagtaggcgcgcttccaaatttggccggccgccgcgacaagaggcgagacagagaggaatcgtcgacgtcgtctgctcgtccgttcccattaccccctcttgcaggttgtttgctttgcttcgtccgacacccaaagaagatggcgccgcggccgcgccgacggatgctggcgctgccggcggtgtacccgtgcgaggccatcgagccggcgccgctgctggcgtcgctgatctccctcgccgcggacatcgccggcctccgcgccgccgacgtggacgcgctcccggcgctccgtggcgcggcacgcgaggctgtccggatcgtcggcttggtcctcgtgctcctcgacggcatcgtccgcgacgctccggctccggatcaggcggccgtgctgggcctctcggagctacacgtggcgctacaaaagctgcggctcctgctcgccgactgcgcccggaagggggcgcgcctgtgggtgctcatgaacgccgagctgtcggcctccgagctccgggtgctgctgggctccgtcgccacggcaatggacgcgctgccgggggacgtcgtcagggcgtccgcggacgccgaggagctcgcggggctggtgtcccggcaggcgtggcgcgcggcgtctcgtctgcggccggacccggaggacgaccgcgcggcgcgggccgtgcgctcggtgctcgcgcggttcgcgagcggcgtgtcgcccgacgcagaggacgccaggctcgtgctcgcctgcgtcggggtcgacacctggctggactgctccgaggaggccgcgttcctggaggccgagctgctggagcgcctggagaccggcagcgacagcgacaacgacaacgacctcgtgctcatcggcggcctcatggcgttcttgctctactgccgcgtcgtcttgttcgaccgcatcgatgattccggcaaggccgcgacggcgaacaggctcccgccgaggtgggcggcgggggtcaacctcaactaggaggcgctgcaggcatgca

SEQ ID NO: 8180 - DNA, 1220 bp, Zea mays
ttactcaagctgcttcagaacagggcagtaagaagagtttaaccatttgaagtcatcaacattttccacatggattgttgcatccccaggtggattcagcaaaaaccacatgttcatggccccaaagttcagtttgtcagtaacaagatgaaatacatgtttttcaggctcctgcaaatttatagcaagaaaaataagagtgtaatataattgaccagtcaatggtacaaacaatgaagagatcatatttccagcttgaagatgcattaaactaaccttagcattcatgatggttgagttgaccacaactgatgctgccaaaacattgtccgagaaaagagcataatggtaaagatcaggattttccaggttctcactattggggaactttcttttctctggagagagaagataataatcaatcgttaagcgcatggaaagacaatggatgccatttgggattgtcttagctgctagctggctaaggaaggtgctctgcttcttcaagctccggacctgctcatctgctgactgaagcattgctctcaaacgctgggtaatttccttgcaatcgtacaatagatcccttgcttttgataaaacttggcccattgctttggttctatccgaagcactgcaaattagagaaaagatgaaccagttcagtaagagaaaacagtatcactgaaaattaggccccaaaacagttcaagcaggaaccacctcttgggaagttcagcatcagcagtagcttccccaagggatcgctggctttccttgagccttgcaagcagctcctgatagagatcaagcttgtccctcgatttggcaagaacagaatatattctggccatgatcatttgatctcgcatcaaacggacccttgaatctgccttttcattttcattttcacgtctccagatgctgtattttcccagcacagcagagtcaacagcttttgaacgttcgatacctgcattctcaagtttaactaacgcttcatcatcctgctgcactacttccattttcttccttacagcaactctccttaatttctacaattaggaaatatcaaaatggtcaggataaggtggaacaagattacattttagagtagctgtaagccatggaaaaaaaaaatggcataagcataatgttaaccactctgggaatcaaacaagcgcagtttcatccctacatatatatacactgcaggtcga

SEQ ID NO: 8181 - DNA, 1103 bp, Zea mays
ttcgaacatgcatatttgatgcctcttgtaaacaacattacactttcgcgtttttatcaatagtctaacttatgaaaatgctttgttatctgcccaccaagatgacagacttctccttaccaagcctgctttatgatctttttgtttaaatctttttgggttcactaaattgccattatttctcttgtccttttttctaggaagaggaagaagaagctctaagacaactgaggaagaacttggtcgtccgagcaaaacccatgccaagcttctaccaagagggacccccaccaaaggttgaacttaagaaggtaatgtatttcctgttgtctgctatgttattttaatcagttacctgtttttttttcattgttcaatctgtatttacattctgaaggaatcttttaggtattcaattagtttcataagttattctgctttatcattactcagatttttttcataagttcatattcattgctctggtgctgcatcaattcatctttatagctccagttttgtgtttttgctttgtatatgttgcttttctttgggtgccaagacactacgtcaaggttagggggatccttatcctattttgttcctttatgttcctgattcttttatatacctcaaaattaacatatagtattttgatattttgtccaagagaaatatgcttgaaacagcatgattcctgggtttccaaatgcatatggcattattgtccttgtgtctggtcataattgaaatttcaatttcctggacacagttgcgtctttgcatttgattctcgcaaaacaaatgaatgccattttcatcatcgacttggtcagaagaaatgtaaaatttttatcactgaacaaacttgtaatgttgctactccaataaatcaccaaaaatagtacaagctgtatgtatagaacgagtttaaatgtcttcttacattaatttatattagcctgttgattaaataatggaaagatgtataagctttcctgcttttagcatgtactagtgcgagccttcatatatatatttatttgccttttgtcaggtgcctccaactcgtgccaagtcaccagaattgacacggagaaaga

SEQ ID NO: 8182 - DNA, 1171 bp, Zea mays
agagctcgctcacgaattcttggtccctgcccatctgcttgatcttcctgtcgatgacgccgtacacgaattgatcgatggtgcggatcgcccccttcatggccccctccgacgagacaccgaggagcctcttgaccttccaggacgggtcgaagaagcggtacaggacctgctcgctggcgtcgtcgaacgccctggcgaacgccgccgcgccctcgtcgtcgccgcagccggacagcgagcccaggtcgaccccgaacccgaccttgaacatggagtccagcgtcgaccgcatcaggaggtccgcgacgtccagcggcctctccccgggcccggcgccccgcgccgccaccgcaacgatcccagcgagctccgcggccgtgtcgcggaacacgccgctgctgtagtcgcgcagcacccgcgtggagaactcgtggctcgccaccttccgctggtgccgccacctggcgccgtccacgttgaagatgccgtcgccgaggaggtcctccatcacgtcgtggatcatcgcccccttgccgtagttgccgaagttggtcttgaggatgtactccacgttggcgggctccacggtgtacacgtagttgcaggtcggggtgagcatgcggaacgtgcggtacctgtgggcgagctccgtctggtactccatcagccgcctgaagtggagcagctggtggaacacggtgcccgccacgggagggtagttccggtgcttgcctccgccgcggcgccggcgagcgatgtagagcgctagaaggagcagggacagcgccagcagagcgggtgtgctcagcagtggcgaatccatggccgaccttgagctctggtgttccggtacgagcctacgaggtgggcgaccgccgaccgccgtgtgtgcttgcgtgtggagtgtggagtgtggagtgtagactgaggagtgaggactgtgctctgcctgaaggtggatgaacctttccgaatggattgaagatttgagagcacaggacagggcaaggatcggatggattaagattggagacgccatcacgctgcgtcaaactgtcgttgttatttgcttttttattatgaacatcagctactttgctgaggggttgccacgacagcgacgacagcaatgataatatctccataatatacactctgcaggcatgca

SEQ ID NO: 8183 - DNA, 1140 bp, Zea mays
tcttgcatgcctgcagcccgatgaacttatccccttcggttactgcggccctggtacgctcgcgttcctcgtaggactcgggtgcgtgtgcgtcctctttgccgtcgcggtctttcccagtggaccaggaccagttctgttcctccgctgccggacgaactgtcaagacggatgggccgccgtggtatccgtgccggctcagagcactgaaatccacaccggttttcttcttcttctttgacctggctgctgttcacagagctaagattaatgttaaaatgaaccgtaacgacaagatatcatactcagaacaagcgtcatctggactggagttcgcatcactagattggtacttgctattttagcaaataaaagtgtgcaggcttacaccatggaaacaccaaaaccccccaattcataacggttgctactccagctttacggaagcaaacacgggatctacgtaagcatgatacatgggatctgaggcccagaggctagccaagtgctggccagaggtggtcagcctatggacctcttcagtggcccaaaccagggtctcagctctggcagggtggatgatagcgtccagacgccggtgctcatcatcgctcccaatcctttgctggtcccacttttttaagaggacattggtgaggtaatgcaagggttgctcatacagctgcttcagcgatccggcgagtcccagccacgatgtgaatgggattacagaatcacagtaagcaggaacgggaatgcgcttcatgtattgctgatacatttcggccctcctgatcagagcacctgcacgatcccattacctcattagaaagatcattcccaaggatatgtgagactgtgacagctcaatccatgcctcagaggtgccaagttaagaaacaaaagggttttttttcctcaatggacatttttaaaataaaagaatttagtcttattcgcaagaattgatttggctatagtagttacaaaaaaaagttgcaaccaaaaaaaataaatactaaagccatattttaaaaagcatcttccttggtagcacaaactattccttgggaaaatgcagaaacaaatttcttaaataaaccggataaccaaatacatgcattggctggtaaaccagaa

SEQ ID NO: 8184 - DNA, 1058 bp, Zea mays
catgcaggatcgactgatttccttgtcactggagtgcccaaaagctgccacgcttcagcatgcacttgctcatgtgcattttttcttctgtcctacttgcaggataaggattcatgcgaaatgccacctgaacttggaatgtcttctagaactgttgctggtgctgttgtaaataggaggcctcgccgcctgtttgggagatcatcagagaggaagaacccactcaaccttcagtttgtatgcactttttttcccttgaactttcttagtttcactgagacaatgtgcgcaaactctgctctgtctaatgctttgcttgctacgtttatccaggagcgtcaagtagctcgcctcgaggcaaggcagcagcaacagaggtactcagatgttctattctaattccacctgttccacattaccagcttatgcattatgtctctcctttctgagttgacctcatgtttttatctctcttcatcccttaatttatgccagattgcagaaaaaaaatgtttgcaacaaagaattttacggtccacctggaagcaaaatgccattctaatgtttttcctctgccaatccttggtcggttatcctttgttaattaataattgtggtattcacttacttgccaggtgtgttattgtgacagttattcccttcaatttctgttacgacttcaaatcactatcgctcaccgagagtgcaagtgaggatccttcatctcgacctacatctccagaagagaaccctgaaacatcgtcctcaccatcgattttgttcctgcaccttaatgctcaagatgtatctcacagaagatggcaggataattcatcaaggctactggaagataagcccacaacatccaatagcatgtctgattcagatttcttagtcaacagctttaccaagccgagtgataatgcaaggccatcaagaaggaagagcaaaaagaaaagcaagaaacacaggcaacgctgtaggaagccgactgatggatctgaagctaaattcagagagggcaatggtgctgcctctgcaggtcgactgtagagtat

SEQ ID NO: 8185 - DNA, 1151 bp, Zea mays
atgtttgcacccgtctaaatttgttttttcatgtatagccgggaccaagaaatggaataatccagtgtttcataaaaagggacaaatcgacatcaacttattatctttacctatgtcttagccctggtaagcatacaacatgtgcactgtttttctcattaatatccttctgaatgatcctacaaggtgacctcgaaatagagcagtaccggatttaacttctgcgtgtgccacgatgcatgcggatatacagtttcttgttccattaatgcttcttctcagttatctaacattgatgacaatggtaaatttaagaaggattagacttactctttgacacccttagtgagatcagataaactgttatcatgaataactttgcttaacgctttgatggtttggatcatctagttgtcctcagcgaggatgggaagtttctgctagcagctaagaggaatcgccgtacaacatatactgagtacatcatttctgtggatcctaaaagtatatcacgatcaagtgatggctgtgttggaaaaatgaggtggagtatcttacctgactacactatttctgtctaacctcaaatgatttttgagctgttttctgtttggacctgacattgtaatggcaacaggtcaaattttcttggcactaaattcatcgtgcatgacactcgagcaccacacaatgctgggagccttgtctcctgtgagcgcggcagccgcagaatctcctctaggagggtttcccccaaggtacccactgccagctaccccattgcccgggtgaactatgagctaaacctgcttggcacaagggggcccaggcgtatgaattgcacgatgcattccatcccagcctcaacgctggaccctcaaggcatggtgcctgagcctggccaacccaagcagatcttcgtccctggctcgtcgtccttcgaagattcctttcgcagtgcaaacaacaccccttccagctcaaggttctcggtcgcagaccgctccttggattggagctcctctcgattctcagagacgagcggattggctcagcaggacgacgatgacagtgaccaggctaaggagaggcctttggttctctgcaacaaggagccaaggtggcacgagcagctggcaggcatgcaagat

SEQ ID NO: 8186 - DNA, 1156 bp, Zea mays
ttgcatgcctgcgagtccagtgcgttcacagtccggtctctttcgttgttccatttcttttgtttagaaaatcggccttgcactctagctctacacagagagacacggtattgggtacagagctagtagggagtgagcacatgtaaaacctttttcggtacaaagagaggagcaaccaagccaaccacttcatgctccacgcggccgggctcaccaccggcctccttccatagcgggagagcgttgcttaaattattaaatgctttgcgttgaccccttcggtcccatttgtactcacatggttggcacagagattcaaatgcctcccacctcccacgttgttgcacagtgttttgcccatcagaatatttcatgacacttcctaagacagatcacgcggcgtgcatgtttttgtcaaaaacttatcccaattcccatcccaaccatgtggcatgctcgctcccattatacccacatagttggcacggagattcaccgactcccacgtcccacgttatcgcacaatgatttgcccattttagaatatttcataacacgtacatactctccctaatacaaatcgcgttacgtgcttgttttgtcaaaaaaaaaacttatcctaaaaccatgtggcaacaaggcaggagaaaaagaatgttatattgcacgcatgtgctacgtcgtgcctgttgttttgataaaaaaaatggtgtctccctaaccaccttgtgtgagaaaacgcaatagaaaaagctcaccgagaaaaaaaaaatgtagaacaattttgatcattcttcagcacatatttgtaggctttaggtctttagaacatattggtcttcaagcccataattatggaatacatggagttaaggggtttttctctccctgcatcatgtagctttctaattaagttgtcttatgccaattcctcgaatgtatttgtggaacctagagactaccatagaatttgccagcaaatttgctgcggacacaaactttgctgcgaacacaatatcaggtcttgtgtagttcgtcaggtatattagtgcttcaatggttctcaagtagggggactctaggtctaaatgggtccctccactttgtatgagtagattggtgcacacaaacattccttcctccagcaggtgctcaa

SEQ ID NO: 8187 - DNA, 1154 bp, Zea mays
aacccatgctcctcagccttgacaaaaagcacagtgaggacatccataacaagaataaaaagcagcggagacaaggggtcgccttgccgcaagccccttttatgagaaatgaagctccgaggcaccccattgagcaggacctgggtggaagaggtcataagaataccacttatcacatccctccacatgggaccaaagcctaatttttccaatacttcaagaaggaaaggccaagagaccgagtcgaaggccttggaaatgtccagcttcaggagaattctaggcttatttttagcatgcagaaatcttgtcgtgtgctggacgagcataaaattgtcttatatgaaacgacctttgatgaaggcgctttgagctttagagaccagcccctccatgtggcacctcaacctattagcaagaaccttagtaaccaacttggcgaaactgtggatcaaactaatgggtctgaaatccttggcaactagagcatcattatgctttggcagcagtgtaatgaaggctgtgttaagaaatctgaaattcctgaagtctctcctccaaactgttgaaacagccgccaaaatgtcgtcttttataataggccagcaacacttataaaaatgccgagtgaaaccatcggggccaggggccttatccaagggaagctgcttgatagtgttcaagatctcctcagtaatcaagagccttaagatcatgctgctgcaaacctaaggcttccaggttgatagtttgatttctttgcacctcacttccaattagattcatatagaaatcccagaaaacctcggccttcccatcatgggaggtgatgagctgatccccatcccttattgcaccaataaaattcttcctcttacgaaaccttgagcaagtatgaaataacttggtgttggcatcgccgtccttgagccaagacaaccgagatctggtcctagccaccgtcatgagcagggaagcaagaaccaaggaatgcttcttcaatctctgtagcagccagcattcgaggtcagtaagagatctaccatcccttgccgattccagttgcaacatcacttctctagccaactcaagttgcaacttgaaattgcccactttcttgtcactctatcggtgcaggtcgactaagaaaatcc

SEQ ID NO: 8188 - DNA, 1153 bp, Zea mays
ggcaggtggccatctggttccagaaccggcgggcgcggtggaagacgaagcagctggagaaggactacgacgcgctgaagcgccagctggacgccgtcaaggccgacaacgacgccctcctctcccacaacaagaagctccaagccgaggtctgtgtgtgatagcgtacacgcatgcgatccgatccgatcatctctcgtgctcgatcgtctcgatctctggcgtggcgtcctccgatcctcgccggcgccgggtagccactcgcggccgtcccggatctaggctagctgcgtgcgcttgccgggtgcgtcgcccctgcgtgcgcgaactgtgatccgcatccgcatcgcgatgttgatctgggcgtgggcgtgggtcggtcgtccatggctggcttcccagctcaatgattggtgggtggcggctcagcagcttagccgcacagcacagctcagctgggatccatgtgggtttcagtgcacgcagcagaaaaggttgttggatgcgtggccctcccggccctgggcgccgctgcctttttcacctgccttgactcatttgcctgcgcgcgtacacgtactatactaccaccgcctggccaggccctgccctgccctgcctgcctttgtggaatcttgctgctggagcaactgcaaaggcagagagagagagagagagagagagagagagagagagagcttttggaaaggtcagcagcagaatatgcaggcagagctgagtgacctgcgtcgagtcttgaacgaggaagatgctgctgctggcgcagtcaatggcttcatcatgcccgttcagatcccggtcctctcgtctcgtctctgtgcctcgtcacagaccatactacacactttctgtgcgccttagcttttagcttttctcgtcggatttgcactgcaaatgacgtgcgcattgtactacgtacgttgcacagcttttgccacagccagtactcgtatgattgggatccgagtgcttgcaaatgtactgcttccttcagtactcattgttttgttttttttttctacccgacgctacgatactcaagctgggacttgggaccatgccatgccgtgcagcagtaccatgaatctcgcatcaagcctgtactagcagctagtagctgctagctaggcta

SEQ ID NO: 8189 - DNA, 720 bp, Zea mays
ctgcagcacacacaaaaaatgatattaagcatcataaacacaagcaacctcccagtagtattaaacatgtgcccatatttcaagatccaacttagaacagcagcaccaacaccaaaatctgtagtagtacaaacctgcaataaatcaagataaagggtaatggacaactttgaagccactgaatttttacatattgttcattattattaatatggttgctcggacagtccctaccattgccataattaaccttctcacctttcaaggttacaaaaatctaaattccccaaaacaaatcttctgttgcaagcggccttttcatgctaccttgctgggcatggctccttgtaacaaagaagagaggaatcgatagcaacatgccccaaaaatcagaggagaaatcaagcatccatttgtgaaaatcattaatccgatgtatctgacgtgtagctacacgagcatgagggatcacattacaggataaaataagaaatgaactgacctcttgaagctccttctccatatcaatatattcagaaattccagcatcatccttcttctccttgataagcttcttgacctgaaatgcatggatataagagacattaagtacatgaattggatttaccaccctcaaacgcatggacataaagaagaaaatggctttaaggtaaagatagaatttgggtaagggaaaaaataaaggccgagaaaattaca

SEQ ID NO: 8190 - DNA, 1186 bp, Zea mays
agaaccgtagaagtagcagtctgctgaagatgaacagccgggagcgcgacggggaagaaggcgcgggcgtgacgacctcacaggtttgcgccaacagggagacgagcgcttccaggcgcccaggatggagcagactggatctggctgcggacggcggcagatcttactgagacaggctggacaacgatgctggagccgccctagacgggcggagttgcagcctagcgccgtgccctggatgcggacggtgggcggcctcccaggcggatacttagacacgcaacaggcgtggccttccaggtgatgtgcggacgcgcgacggccttaggcggacgtgcgacggcggccgggagggacgacgacggctgggagacacaatggctgaaggagcgaaaaaaacgggccttaactggagccaccaggttgtgggccaaacaagtcatcttgactgcatgacattgaaggggagtaagggctgtttgctccaccccacgtttttgtatcagactaccagccagcaggctatacacctgccacactttgtccacatgacagtattactatgtgtctcttacaggagggcgggcctgtttgcattttgaaactttgcatataggtttgttagtcacactaattttgttggattttttttcttgaacacactagagagttgtgtatcttttgtattgagaagaaaaggggtactgaaacactagaggatcaccacctagagaggtgtagtaggtttctttgtgttagatggatcagtttttgtatgcctgtttttggcctccgtaaggaggacttgtttttggtccatttctgggccttgacctcttttcttctgttgcacaattctcccacatgtttgtgaaaaaaaaagattgcctagtgccttttgtaaccttgacaccaagtattcggacagtcaacaaggtgatggccttggtggccactaggccccacaactttgcttcctcatagaccgaagcaaggataccttaaggttaggcgaagcaacatcaaagacaatgattccgataggtctaaagtgaccgggttccaagaataattaatgatttgagaccctacatatcttgaccagtggcaatctctttgatcggcaccaccaaacttcaaaggatggctcagctggctggggagtaaggttctgcaggcatgcaaa

SEQ ID NO: 8191 - DNA, 1168 bp, Zea mays
acccttttgatgtgtataccaaacagcttagattaattcctatcatggcttactttgaaaaggggccgaatgcgttgtacgttggagtacaaatacatcctctttgttcaacgtgcaagtgcaagcaatatcaactcaggtgttgcgtactttacccagtctcaggagagcacttcacccaggagagacagttataatttccattttctcgatgcagaacagaccacaccaatctgtggtttcttcgactttgctcaacccaaattcttggatgcctgcgtcatcccaaccatttcccagtagtcttgtgagaactttactgagaaagaagccatttgttagtttcttatcttacgttattaccttaaataagtgctacagttcaagccaaagcaataaaaggagttatatatcaaatattctacaaactagagctgatgtcatgctgttaagttcccccatctgacagactactcatgtcaattagtttgagcttcatccctttgaacaatcaggcgattaccttagatggcacatataccattccatttacttttgtttcgttccttggttaacgagtgccttcttttaatgcaaaacaagtgcctgtcagatgtcctccaggagatattgaattctataactgtattataagtataagcacccactgttgtttgaacatgtgttcaaaaaggaaaatggaacaggcatctgtggcgacatggttgaatggatattttcataaaccatggtcacatgtaataaaggagtgggttcaaggtacagccgtacagcccttatgcagagtaagaaggtttacatatacttgagtgggtacatatgtagtggaagccactaatcagatgctgcgaaaattctaagaatattgagagttagcgttcagagtgcaattattaatattactcaagtccaaactaaatccgtgcttaaaagggaaaccaaaaatgagttaagttgcaatacagacacattgccaaacttccaagaaataacaaactacaagtgacagctaatgttgtaacagcaaataccttgcaaaggatgagtgcatgcagcagcaagtgttcgaatgattttgctgctgcaaattaatttgagccatgagcccagataatttgtgtaagaatatcacacttccccaacagct

SEQ ID NO: 8192 - DNA, 1154 bp, Zea mays
agcttgcatgcctgcagtgtctttgacatatatgtatatacattgcttcttcacttcaagtcagtaggtcaaatggatgtttatctctgttctaattgtcaagcacaacctgtggtgtttttatttacattccacagtcgttgttctgttaagtagttttgaaaggacgccctctaaatgacaaaatatatttcgttccgcatttctaagaattaaggtcccccaggccaagtataatggtaaattgcatatgtttatcaatttgattgacatccagttacctttttgcaagtcacacttttgaaagttatctagtgtagatttccatgcaccagagaccagagcttgtttcattatctgtccagaattgtattcatgacattgaaagccattccttattttgtagtagtcagatatgaacagcccctgtatgtttatatttttaacaaatacatcagtatcttgtgctgaacattatattctgctgtcagagtggaaccagagttccagttggtggagacaacaacgttgtccacaaggccgaggatgttgtgagcactatgcttgccaagggtttcgtgctaggaaaagacgcggttggcaaggccaaagcgttcgatgagaagcacggcttcacatccacagccggtgctaaggtggcctccatcgacaagaagattgggctgagcaataagattaccacgggcacttcgttggtcagcgggaaggtgaaggagatggaccagaagttccaggtctctgacaagacaaagtcagcgttcgcggctgccgagcagaaggtgagcagtgccgggtccgccatcatgaagaacaggtacgtcttcaccggcgcgtcgtgggtcaccggagcgttcaacaaggtcgccaaggctgccacggacgtcgggacgatgaccaaggagaagatggcggccgaggagcagcagaagggcttctccggcccgtcgtctaggagccactcgtacacgcccatccgatgattcgttggctttctgttatgcgccctccctcagacagacaatgttgtagcacataacacattggtggatgtaagacatagatagctatatagaacagatcatcaggccccctctcaccacttgttcaccgtcccatgttctgttaaatttcgt

SEQ ID NO: 8193 - DNA, 1218 bp, Zea mays
catcttgcatgcctgcagattgttgtttctttgtgaatattctagaacagtttggaatagaagctattgtctttctaagaaagatcagtagcgtgtttacaaggatttttttattacacatcccatcataaatttctcaggcatgaatcattatttttaaacagtttcaagttttaagtttattagcactctggtggttgagcatgttatgttcttgcagattgttggagagattaaagctgctcggaatgctctgatacaagtaacaacaaaattaaggagttttctataccgtgagatgcctgatcctattcaagttggcaatatcaatttacatggagccatttctccagtagcaggctcacctcgaggaccataccaaggaaatgatatcccaatgggtgcttatcaccaagcatcgcaactggcaacttcatggcattcaaaggtatgtctattgtacaaataattcctttatgctattaggaaaagatgtttatacatgaccagactgtttaaaagacactaatgataccactgtttatttttatcttttttacaagttccacaatgtctcccatcttttgataagccactaagcttcatttcttcccaaatgcaccgaaagctatgttttaatagttattattatcaatcttccatgcaacagtgcattctgcatctctgcttcacaaaacaatcctagaaataatcaaagacggggaaacattatactatcatatggtgcataatgttggtaatatgcaatggttacttgtagttcatgctagctaccttggatgatttctagcaactgtttttgaattgtgcaatatttcatgttcaattgcaggatagtggaggcagtgcaagtggatcatttgagcaaggcagcaacattaatgatgatataaggcaaagtgctacaaaaaggtaatattttgcccttgctgttatttctaaaggttgcttgttcctttgatcacctttttttgccctccatcagatttgccgttcctctagtgactagaagcacactagaaattgtcataccaaacagtgctgttgcaagcctcaccatgagagctggtagcaagcttgctcaaataagcgaggtgcgattgtataatgaatttaattgagtgccaaaaggcggacaatcattaccctcctgctgccttctaacagtttttctggaaccagataggtggtgttgcg

SEQ ID NO: 8194 - DNA, 950 bp, Zea mays
cttgcatgcctgcagctagtggcactggacactggtattgtcaatgtctgcacgtaaacgcagccttgttgtttttccttttcacccctggcccacggggatggtgacaatagtctagctggagaaaatcaacagctccagccatatgaaagtgtctgtactctgttggcaaccgaccggcagcaaagtaaaagcagcagcaaatcgattgtaaggtaaaaattgcattacaacaaccatgtatatcctcaccgacaggaaacatgtattaaatatatatataatatgtgtatatatggtatacatagtgtatccgtatgaatcatggaagcgcttgccccctttggggcgcctcgtgtgatgcatgcgatgcgagaccaaatggaaagcaacaaccggaagaaatgcaatgggtacgcgcgcgtacgtagacgagcgacgacacgagtttgctggcgatacgccaacgaccaacgcctcaaccaccggctcgcgcgggcgcctcgctcaccgcaagcagagagagcggcggcgggcgcgggcggtagtagggcagccacgcctagcgaccttttcatcaacaacgaaacaaagcacaaagcaacaaggacgacgacacagcacagcacacagcagacaggcgcgctcgctagcactcgggcgtgagcgagtggtccctgcggaagtcgttgcagtagtagtagaccatgtggccctgctgcgcccagcgcatggccgcgtactgccgcggcgtgagcccggcccccgggtggacgccggcacggcctgacgcggcgggcgctgcgagcaccgcacacaacgtcagccgcacatgctgtacgagcgccgtgcgcgctcgtgcatcgagtcaatgacaacctggcgcgagactgcgctacggcgcttcaaagatgtgtccgtgtgtgagccggacaggactccaagctctc

SEQ ID NO: 8195 - DNA, 1160 bp, Zea mays
ttgcatgcctgcagcctatctgctgtccaaaccttcttgtgtgcgaccagccacataaaaaacttggtttttggaggagcccaagttttccatattctatgaaaagactcaaactcagaagaaccaataaagagagccttatatgcttccttagaggagaactttccatttgcagctaggcggaaaaaatgcttgtcttcaacatgaggtcttagaacaattgagtcaattaaatcccacaagatgagaaattcattgataattccaacagaaagagctccttgaatgtcagaaatccaacactgagtagagatagcatccatcactattctcttgctaacccttttcttaggaatgattccaaataatcgagggactaaatcaacaattctgtgccccaatagccacctgtcggtccagaagagagttgtagccccattaccaagctcagtttgcatagccattgcgaagaaatctttcgctttttttagggacgtggatggcaagagaggctcatgggcgatttgtcttagtttttgccagccatagccaacgcattcgaagcgaccaagcaagttctttcatgctggaaatgcccagcccacccaactcacgggtcctacaaacaattccccaagccacatgacaatgaccaccttttgcgtctctgcggcctctccaaagaaaccctcgacgaattttatcaatggctttaagggcccaagctggaagatcaacaaccattgctaggtagatgaccatccctgtgagaacatgttgaacgtgcacttttcgaccagctttagtcaataactcagccttccatccagaaagttgatttgcaatcttgtcaataatgggttgaacttgggtttttgaaagctttttacattgcttttcattatgttggttgactagcgaactgataatgaataaaatgcacacacacaattcaactaattttgctaactgttagctcctttagattccatacgtcaatgatcttctataactctttacatgatgcttgtatgctttacaatttgttaaggtggcaatgtgattgcttacacaatcagtattcatcttgcaggatgtttggaaatcgtgtgccacacatgctcgataatgattatacaccatattctgcaggcatgcaa

SEQ ID NO: 8196 - DNA, 695 bp, Zea mays
tacaagaacctttccaagaccttgaaggacgtcgtctggaaatccgacgatcttcaaacgcaacatgcttcttagcagaacctcagagaggaggaatggcaaactattttgtgcaccatcctttcaagcaaactattctgcatgtaacggtgggtgcccaggaaattgcgctggtgctccaccatcgttgtatatgctgcgtcttgagttgcttgctgtagctgaagggaagttcattcagtaggttttgagtatgagttttgtatatccgtatatgcctatgactatgagccgtgctggaacactatgatcagaaactgcgaaatggagcccagaatgttcttgccatcttgctccagttctcagcaccgggcttaacttgccttgcattttttgaagaagaaaaatggactactgaattgggaactcgtattagtattcggccatcatttcagtagtcttttttttgggtaccatgtacaccgcgaatcatgcaggttcttcctttgcttgctgttagttacatttggttctcctgacagctagaaactaaggtggcagagtgagtagagtttcagaggattgtacaggaggggcagagccgcttggagtgagatgactcactcccatggtcttccagctcctggttccttcgtctgcacaggaacccaacattgcatttcagacttgaagat

SEQ ID NO: 8197 - DNA, 1163 bp, Zea mays
catcttgcatgcctgcagtcgcacccgtgagtgctcagtgctcatcacttttccctcctgctacgtccgtctgtctgccttttgtccactcatctaggagtgagtattttctttcttttggatgccatgtctgatgtatgcagccacgccgcaactacaactggcagagcttacaccattctactaaggtttagtttaatcacctgtatcatcacaacagtgagatccatccatgccacaaacgagcataggagctgctaataaacgactaattaactactactactactattatttatgcctactactcactcactcacacttactatcatatacttatcataggcctaagagctaaaaaaacaacctagacttgtttcttcttctgttgctgtcttcactgtcccctccctcctcccactctctgaagaagattacacctctccaaaggtatttcttttttctttgtcaaagcttctctacgcctggttgatggggccaatcatagccattagtccctgcgcacaacagcccgtcaacatgcaaattatggccatcatgattcaggaggtgtggctcattctatgctggcatatatacatgcatcatggtcatgggagcagcagctagcttattattaatggttacagcactatcagaaagacagacacttactcccagattagaggaatggaggggccccctcccccttttttgctctgtgcacctcacatcacagcccaatggcttcatgcccacgagaaaacctggagaaattccgaacagatgtaacaacaacaaaaaacaataatctttaatttcttttgctcaccccacatgaataattgcaataagaggaacaccacgctgtaacttcctgtagactatagcaagtagtaaacaccaatcattttgtagccagaaacctctacttcaatcatggggcactaccaatgtatcactaattggaccacgtcgaaatacttaagccacctgaaagaaataactagtagcagcatgaaagatttaagctgctgagaaagttttacctgggcacctgaaagaaggaggaggagctgtaggggggcagctcgagggtggtggaagacgcgggtgcgaaaagggccacatggcgagggctgctgctgatgctaccgttccga

SEQ ID NO: 8198 - DNA, 1208 bp, Zea mays
atattaaacggagggaggatgcaatgaacagaggtagatctactattccatttggtttaagcttcagcatgttcagtttcgtcagtgcactgaagatgcatttgtctgcacagctggtgtcactttggaagtgagaaattggccgcagttctatcccatcatacatcacgatatagccagtgaaataccaatccatgctcaaaagttgcaatacacggcgtttgctagctggctaggtacttgaccttgaacctaagtatctttccctatttcttgagatcacagctgatatttgttttctctcctagagttcatcatttatgttggttcttttttctaggactgattgcctgtctcgtttggaatctgtttgctgtgttagtggaatcaattcatactgaaggtgatcaatatttcaacatccagtcaatcctcttcagtatatatgtacattttcttctgatagatttctaatttgcagatatcgttattttcctcctcgctgtaatctatgcaatattcgggtgtcctctttcatacatgctttggtacagacctctgtaccgtgcgatgaggtttctcttttaaactatttcaagtttcggtcattactgaacagcactccatggatatgcaaattttgaacttggttctctgttgcccacagaactgacagtgtggtaaccttcggccagttcttcatcttctactcggtaattttatgtgtttagtaaagttacatgaatctcaaatttcaaatatcggaaaatttctactaatatattcccatagcttgaattttcttgctcttcgtcttatcatataatggaattctatgtattgagagcatcacatgtcttggtatatgccaggtgcatgttggattttgtgtagttgctgcaattgctcctccaataatatttaaggggaaaactctcacgtgagtataattagtaaagttctgttttttttcttggtttccatcttataaccaaatcttcctgagtttcctctgtgatatttctcatcgccatttatttgctaattcaggggtattcttgttgcaatcgaagttttagatggagatatattcgctggtgtaagctgtcctgaaatatttttactttttaaaaacattttttacctcagttcatgatccattaagctaagtgaaatcccttccgagagaactaataacagtaagtttt

SEQ ID NO: 8199 - DNA, 1177 bp, Zea mays
agccaggcaccacgcacggaccactcggtctcatgtagctagcagctagcactcactagcagcgaagagtgaggagtgagaggacacggtaaccccagcggcattcgctgctggtacaccaataatcgagcagcgtgcgagagagagagacgaaccgagccacagagaagagggaacgcgaagctactggcgaactgacataacacgcctgcgatcggtagatagatctacatcatctacaccgccgaggcgccgacaaccacttggcgaccatgagcacgggcacggacgccgtcccggtcgccgtggcgccggcgaagcgcccgcccatcaacaagtacgccttcgcctgcgccctgctcgcctccatgaactccgtcctcctcggctatggtaggctccttcggctgttccagtaaggacgtgcgtgcgtgcatttcgttcctttccgcccgcgtcctagctattactccttcgttcattcatcatggaagcatgcacgtaaatcaaaacaacatcagctgctacatgggatgagactatgagactctccgtctcctatactgcgctaaccattctcttctttgattgatggctgtggctggccatcgccatattcgatcggtcgaccagacatctcggtgatgagcggcgcgcagctgttcatgaaggaggacctcaagatcacggacacgcagatcgagatcctcgccggcgtcatcaacatctactcgctcttcggctccctcgccgcgggcctcacctccgactggctcggccgccgctacaccatggtgctggcggccgccatcttcttcacgggcgcgctcctcatgggcctcgccccggactacgggttcctcatggcgggccgcttcgtggccggcatcggcgtcggcttcgcgctcatgatcgcccccgtgtacaccgccgaggtggcgcccacctccgcgcgcggcttcctcacctccttcccggaggtcttcaacaacttcggcatcctcctcggctacgtctccaacttcgccttcgcgcgcctgcccgtccacctcagctggcgcgccatgttcctggtcggcgccgtgccgcccgtcttcctcggcgtcgccgtcctcgccatgccggagtcgccgcgctggctcgtcatgcggggccgcatcgacgacgcgcgccgcgt

SEQ ID NO: 8200 - DNA, 1214 bp, Zea mays
gaggcatattttttccatgcaggaacgaattattctccctctctcacacacactgattcccagagagttgagaacgtcgttacatgtgtttagttcacggatggtttgagtttgaaaaaaaaacaaaaagaaaagtccacggatggtttgcctcattttagcccactggaaagcccacccccacgaaccaaagcttctatgagcccagcccacctaacctaccaaacatgccgagccatcaacacccggcagcccgccacgccatccatccaacgacccacactgagacgtcccctccccgctccgtcctctctcctctgccgccgagacgacgcgatggcggggtccgccgccttgccgccgctcgccgccttcgcgtcgctccttaccgcgcggcgcttcgccgccgccaggtccgcgctccggtccctgctcacgccgcgcctactggcggtgccgttcgcggacctcgccgcctcgtcgctcccgcgcggcgcgccgccgcacgccgtggtggcgttccacgacatgctcttccgcgcgtacgcggacgcgggcgcggcgtgccgcgcggccgaggcgctcgacgccgccgtgtcccgcctcggcagcctcgacccgcgctcgctcacgttctcgctgctctcgctccgccgcgccgggcgcctcgcggacgccgcgggcctcctggagcgggcgctcggctcgtgcccgggctccgtctcgccgttcgccgcgtccgtcgtcgtcgacgggctctgcaagtcggggcgcgtggacgacgcgcgccggctgctcgacgatatgcctcgccacggcgtgagtctgaatgcgctgtgctacaactcgctgcttgactgttacgtgcgacaaaaggatgacgggcgggtccaggagattctagagatcatggagaacgaaggcatcgaggcgacggtcgggacgtatacgatccttgtggatagtttgtcgaccgccagggacatcagcaaggtcgaggctctgtttaatgagatgaaggcgaataatgttgtgggggatgtgtacctgtacaccgctgtcatcaacgcgtattgccgagcagggaacatgcggagggccgccaaggttttggatgaatgcgttggcaatggcgttgagccaaacgagcgtacatatggtgtattgatcaaagggttctgcaagattgggcagatggaggctgcaggcatgca

SEQ ID NO: 8201 - DNA, 1111 bp, Zea mays
tgcatgcctgcagcacaaaagggcaaagtcagaaatggtgcagcttactaaacaagacattaacaaagggaggcttaagccctgctcacatgaacaatgaatccaatggagtccttgtagtccagaagttccttccactgcttcccgatgcttacctgatagaggaggaaaatgctcggcatgtttagtctaattagttattacacatatggaataaatgacaacaatgctgaagaggcaacattttataactttctaagacataagaacaatccactggtacgggttaaaaaaactgatcctcgcaacaatttcctgtatcatggccaggacgagggaaatagccaatttgttggtccaataccatccatgtttccctttcatttacatgttttcttcgaaacttgcaccacactacccaataggccaatacccattgaatttccagttgtgagtaatgaaagtaacacgagggcctgtttgaaagtaaaagtatttttgcagttatagccaatattatggtttttatatgaataccgtagtattttataccatgaggtgtttggatgtattcctgaaaactgcattttcaaaaccatgatatttgtagtgtattagaaactccactccaacctaacctaaagtttttatagcatggctagcttttgcctaaataccatgttttacaatgtcgtatccaaagttccaaacaataactagtattcttggagctggccaaaactatgatattgtcatatgacaattgtaatgtatagtattgtaaaactatagttttgaaaaaatattgttaccaaacagaccctgagatttgagatacgtgcactgatggatgtttactctcagtttgaaaaggaaaggaaaacgtaagaaaaggagagaacaagttcaaaaaccacatgtattttaccgttgccaatacccaccaggttttcagttcccagcattagcaatgactggaaagtagtggcaataccctggcactactcccagcacactttgatttaatagaagtaactattgtctaaatgtcaacagataaggacgccgttcccagtagcacctgcttttttctacagtacaaatgtgaggt

SEQ ID NO: 8202 - DNA, 1129 bp, Zea mays
tactccacgggcttcccgagcccgaacgggtcgaacccgtagtcgccgaccagcgagccgtcgaggtagtcgggcgccacggcgccggggaaccacagcggccggtcagaggagatcgacgtcttcgccaccttcttcgggacggcagccttgggctttccgccgccgaacccaaaccgggccacgatgcgcccgttctgcggcgccgggtccgccaggcgggtgcccaggaatgtgctcgccgcggcggccaccgacgaagccattggccactcctcttctcctcgatgtgctgaggttggtggtgagctagcgtccggtggtggtgtgtggcgtgggggtggggctcgctcgtcacgggctacaaataggatagtgcttgtaggaaattccggtgttatctctgggtggcaaatcggacggccatagaacggatgtgatctatttgacggccacgatctgccttatccggttcttatctgtatggtccaatggatgggctgctcgtgagtcgtgaaggaccatgggacacgtggagggatacaattgggaggagggcatttggattttggagtgccgcctccgactggaaaatatcgtcaaaatactcttggagaccatgtggttttggacccaaaacgcgtgcgaagctcagtttctgtcgctcactgtaaccatcatgcctcgcagtataactgaattctcagtttagaggcaactaaaggaacctttttttttttggaaagataagcgaaggaattctcagtttctccgatgttgctttgctcttttttaaaagaaactggaggggccgtctctacagaaaaaaatatatatataacaagaaagggagaaaagttgaaaaggctatcaatgaaagtaaactgatacatatgttcaatctgtagagtacaagaaacaaggaaagagttacagactatatacgacagcaaggggaagaacaagcttagaaaacaaagaaaatgagcaaagaaagaataaaacaaacactttagatccatcgatcaaacaaagaacttaagcaaggcttcactccatggctgaccattaaggtctccttgttgaagaacattctgtaatcttggctactcatctgcaggcatgcaag

SEQ ID NO: 8203 - DNA, 1057 bp, Zea mays
acatggcgtctttaaggaataaataaagaccttaggtaattgtgttaagtccccacagttacagtggcaattaaaacgaatattataagtttttagatttattcaaagttgcaaaacggcatgcccatgtaagtggagaatttctttgactagaagaagcatatttgtagtatagcagtttctgcgtctcaagaaaataacagcatgaataaccaccacaagttcatcataaacatctaattttcccagcactatcatagccatataatttggatatatagatgtgggtacaaactgatactgccattttattgaacagaatacatacagtaacggtctgtatttctactggtggcattagctaaagttttaagaggtcagatatttttgaatactggtggtacgccctaatgtattaaaaaaatataagctccagatgagaatcatggacacttcaagacaagatcaacaaaaacgtgacgagtctattttttccagtttaatctccacataaaacactgtattaagtatattgctttcagggggaggaaaaagggtatcacgcatatttctgcatttgaataaaagagtgcatcggttccaattctaacagcgatgaccatccagtccattaaatgagacaactattacttacgaaaagctcaatagggacaagtgaccaccaaaattcggggaatacaatagagcaactataatgatttcacattatcaagcaatagtgtgtttcggataactcaatgattagagtcctgcatattaggttatcctttctaatgcatgtctgaattatatcacatattcctcgaagcaaacattacattaaggaacaattacttgtgaactcaattaagtcaatagaactataatgaagcaatcaagcagagaaacacaatacttgtatggatttaccttgatcactgtgacaatgaagatcttagcgaaggacgagtgcctcttcaccaccttcctctgtgccatgacaaacggctgtggccttggctgcaccttgagcgggacagcagggaacggtgccgcg

SEQ ID NO: 8204 - DNA, 781 bp, Zea mays
cttgcatgcctgcagcatggacacgacgtccctcatcgacggccgctcctgcgggcaccggctggtgcagagcagcgccacccgcagcgccagcgccatctcgtcccgcaccgcctcgcgggtctgctggtccgcccactccgccgcgtccatcacgttgccggcggcgaccttacgcctcgtccagtccacgatgttgctcccctcgccgtactccgcctccacggacctccggccgatcaggatctccagcagcaccacgccgaagctgtacacgtcgcttttctcgtctacttggagagtgtacgtgtactctgcgcgttgattacgtatgattcacggaccatcagtatatagtcaatcgtcgtcgtgcgtgacaaatgtcgtccatgtcgcgacgaacgtatacgtacgtacctggtgcgatgtagccgtaggagccggcgacgacggacatgggcgcggcgccctggagcgccttggcgacgccgaagtccgccacgcgcgcctccatgtctgcgtcgagcaggatgttgctgggcttgaggtcgcggtgcgccacggccggcacgcagtcgtggtgcaggtagctcatgccctgcgcgacgcccacggcgatccggtgccgcgcgtcccagtccagccccgcctgcttgcccctgcacacggcgccgtgcaggagctcgtccaggctgccgttcggcatgtactcgtagagcagcagcgtcgcctcgccgtcggtgcaccaccccagcagccggacgatgttgcggtgccggag

SEQ ID NO: 8205 - DNA, 1166 bp, Zea mays
agtattagtaacaggtactcccttaattacggaccgtgagtgaccaaattaacctcccttcggttacccttgcagggtggacgcggacgcggacggcaggatgtctgaggagaaggtcagacaggtaactttttcagcagcctttctccagttggtttagccggaacagcaatataatgccgcacaagcacaaacagacacagccttgcctttcttctattcctgccctgatggatgtatctgcggcatggcggagcgcatgcagaccatcacgcagagggcgtccgagaacaagctgtcgaagatcacaaagcaggcggaggagtacgcccggctgatcatggaggagctggacccggacaaactcggctacatcgaggtgcgcaacctggagaggctgctggaggaccccagccagttggtgagcatcggcaccgccaaggacatgaggcagatgctgaggagccagagcctccgtccgacgcccgagccgaaccctctccggcgcacgcagtacttcctggaggacaactggcggcgcgtgtgggtggtgctcctgtggctgtccatctgcgtgggtctcttcgcctggaagtttgcccagtaccggcgccggtacgtgttccaggtgatggggtactgcgtgtgcgtggccaagggcggcgccgagacgctcaagttcaacatggcgctgatcctgctccctgtgtgccggaacaccatcacctggatccgcaaccacaccggcgtgggccgcgtggtgcccttcgacgacaacatcagcttccacatggtggtggccgcgggcatcgccgtcggcgccgggctccacgtggtgtcccacctgacgtgcgacttcccgcggctgctccgcgccacggacgccgcgtacgcgcccctggcgcagtacttcggggtgccccgcccgcgcaactactggtggttcgtgaagggcacggaggggtggacggggctcgccatgctcgtgctcatggccgtcgccttcaccctggcgatgccgtggttccgccgcggggagctcgcgctgacggacctgctgaagcggctggtaggcccgctgaagcggctgacggacacgctcaagctgacggacccgctgaagcggctgacgggccagctcaagcggctgactgcaggcatgcaag

SEQ ID NO: 8206 - DNA, 1145 bp, Zea mays
gggattttatgagacgacctgcagccagccgcttgagctggcccgtcagccgcttcagcgggtccgtcagcttgagcgggtccgtcagccgcttgagcgggcccggcagcgcgagctccccgcggcggaaccacggcatcgccagggtgaaggcgacggccatgagcacgagcatggcgagccccgtccacccctccgtgcccttcacgaaccaccagtagttgcgcgggcggggcaccccgaagtactgcgccaggggcgcgtacgcggcgtccgtggcgcggagcagccgcgggaagtcgcacgtcaggtgggacaccacgtggagcccggcgccgacggtgatgcccgcggccaccaccatgtggaagctgatgttgtcgtccaagggcaccacgcggcccacgccggtgtggttgcggacccaggtgatggtgttccggcacaccgggagcaggatcagcgccatgttgaacttgagcgtctcggcgccgcccttggccacgcacacgcagtaccccatcacctggaacacgtaccggcgccggtactgggcgaacttccacgcgaagaggcccacgcagacgcacagccacaggagcaccacccacacgcgccgccagttgtcctccaggaagtactgcgcgcgccggtgccagcgccggagagggttcggctcgggcgtcggacggaggctctggctcagcatctggctcatgtccttggcgcccgtgccgatgctcaccgactggctgctgggggcctggaggagcagcgtctccaggttgtgcacgtcgatgtagcccaggttgcccgggtccagctcctccatgatcagcagggcgtactccgccgcctgctgctccgtgatcttcgacagcttgttcgtcgacgcgctcagcgtgatgatctgcatgcgttttttcgccatatacaacaacatctgtcagggcaggaatggaagaggcatttccacacagaagaacgacaagcaaggcggttggttacctctatgatctcctcctcggtgatcctgccgtccgcgtccttgtccaccctgcatgcagttaagggagtgttactacccctgttgaaaaatatcaatcactgagtgacgacgtcgtatcgtacgtacatgtcgaaga

SEQ ID NO: 8207 - DNA, 1138 bp, Zea mays
ttcaaaaatgtgaaccttttcgtttgatatgcaagctatcagtactgtacatcctaatcgaattcatcttttctcctaatagacaattgtaacccaccttgaacacaattattaactaagcatggcatatccttttattgctggacgcaccttcgctgaggtgtttttgtttataattactataataatttccttgtccgttgtcagaaaatacgaaccatatacaacctctacagtcaaattccaactgtagagttctagatgtcacacaccagtacaccactacacatgctatgctagtaaaagtcttgcctagatttttagcaatgagcaccttgttgtctctttaaaaacaatagagagccattttgatttagagtttaggttgttttttaactcaaacacgcaagagagcttcatgtcattgtaagacagaaaacatgcgctgacacactagtactattgtgttttatatttttgggtcactaatattgctgtcatttttgtaccattctcagtttagtctgcataccacgatgtagtatgtgctttagcatgactctgcgtttttcatgtaatagccgaagctcatcgcccactcaaagagtgttactttcatcaacccaaagactccggtgtacccgcggttagcacaaggaaaatcctggaacgaagtaagtttcagtttcaatttttttcttgtaagtatgaaggaaacatcaactttgttttgtatgacccacaaagtaaaaagcattgaatgcaaatatgttatagactttgaccatttctctaatgtactttttttgtagttgcaagtaacatttccctttaatcaaattataatttgtagatacatttaaagtaacacaaaaacaagaactttggacatttcagttagtcattatttagatgaacatttcttagcttatctttagaatttgttcttagttataaaagttttttaaaggaaaagtgaacacaactgctttcaggaatgaaattgcattgtatcttcaattttttttactgattttagtgactttagatgatagtgacatggacaagtggctatggtaccaatgaggctacaccatttgtcagatggggcatagaagggcaaatccaaaccctttct

SEQ ID NO: 8208 - DNA, 1136 bp, Zea mays
ctagatcttatatgtgcaacttcttgcttcgaagccttcctcacaaggtaggctttgacataggactgcgaaaatcagttagataaatgtcaatgagaaaatcacacttaattgcaattgttttttctatgaaaggaaggatatttgcataatgaaataatgtttcctacacttggaatctgaatagatgcatggatattggtttcatttatccaactagcaaaaatcatgttgtacctgtattatagtaatactttttctagttctaaaagcaacttgtcgtgctatccaaccacggaaatgagcctgtataactaacgccgcttgcttcctcaatttaaggaacaaaacctttctccaccatctctgcaaatagacttattaagtattaatctgtgtatatccaattaacaaaaataaacttacagagatcagacatcatctgcctctttattctacctgtatgttacagatagagtttctagttctaatagcatcttgtcgtgcaacccaaccacggaaacgagtctgaatgacaatcacagctcgcttcctcgtttgaagaacctttcgccaccatctctgcaaataaacgtgccagattacagtaattcttgacacttaaatggtggtactaggctacatagccagtctagaagcattttttaaaacaaatagcatacatacttgaatgatgttgatgcaacggaaagtttggtttagttgcttccgtgccaaccagccacggacaaaagactgaattgagatcacatatgttttgacagactgacgcagcaggaacttcctccagcatctttgtagccttatgacagagtctagcacaatgttcaactcaaggctttgataacattttctcttttgactttggtcgactacacaaagtcttgtgtaggttcgcagtgaagaggaacctgtataagtagcatctgtcagtaatacttggataatacaagacaaatcacatcttagcaagttagcagctttacatccgtaatgcaaccgccataacaacagtcaataagcaacaagaatatatcaaggacaatattagatgtacatactaacctaacagtctctttctagccagccatcctctgacaactcgctgaatcagt

SEQ ID NO: 8209 - DNA, 1170 bp, Zea mays
ttgcatgcctgcagacctgctaaaaagtttaaagatgcctgctacataagattaacgaattcaattggcaactagagatttcgccgaatggataactaacaacctgctaccaaaatatatacaagctagctaggctactgttcaatttttcaagcacagatgcaacaagtctatatgtgcacacagtctgatgcagccctcttgtgtcatcactattctctggagagcatgcaagtttcataatcttgggaccagagaaaggcgttggcgatcggcgctcctgattcacgacctcatgcaatcagagttttatctccagatgtccaaatattggcaacacgtgcccaggaaccatgctcaggaaggctatgcctgttcagttccggccatgtggataagcttaggaggagacacacaaactgtgatccacagtgtaaatgtttggtatgccttatctcgaattcagatggacagaaatccaaacattattaggagaagatccattttgtaaaacaccttatagtacaaattaatgtaaccccctctcctttatagaccatatatatatacaaataggagcactggaaacaattctacaaatcatataaagacttagctagcataattttatacggtataaatgaataacatgatcatattaatcatgagagcaaataatgatagtgaaaaaaaagtttttttcagattccaaactaaaatataatagttatgcatggctgtgtagagcgcagttgatttgagacaaggtgttagacgaaatatatgcctatatatagaacaataatacagatatatagaacaaaaatacagatgaaataagggtgacttgcatataggagtatatcctagcctattcagtttaacaaagcaattatgtgaaggtccacataaaattgcaactatttcttgttttggaaaaaacatctcaatctttgcaaaagatatgtacttctaggcctggaactggcaggaccacatgaaattgtaatgagcgtccatttcatatcttgaccaaacttaagtagcgcttttgaagaagctaattatgactttatgagaggatatttgatgacacattcgattgaataatgatttttgtgcagtaaaacgcgtggatgtgccagatttagaaaatcctgcaggcatgca

SEQ ID NO: 8210 - DNA, 1057 bp, Zea mays
cttgcatgcctgcagagaccgtcatggcggccaatccgggccactacgtcgcggccgtcatcaccaccgcgcagccggacgcgggagacggagcagcctcttctgctgccgcgcccgtgaagcacctcaagctgctccgccccgacgacacgctcctgctcggccgcgtctaccgcctcgtcagcttcgaaggtactgtgcgtgcgtcgtgccctggactggcgccgaacgggctcatacgttacgttgctggccgtgttaggcccggccgtcatcttgctgcgcgcgcatcaggtccttgcgtgttcttgcacggagccacggataaagatgaattgtgtgtcttgttcggtttgaatggccgtatgttacccggcgcctttctgaactttcttggcgcgcgcggcgcgtccgtatttggacatgaatggctgaatgccacagtttcactttcaccatcgtttccaaacagttctttccctctctgccttcctttttctcatgtcgatgtcgcttttgccgtcgatccaactgatgaacatgaatgaacccgtgcgtgggtgtgtctgcatgagcagaggtgctgtgggagttcgcgtcgaacaagcggcaggtgaagctgagccgcgtgacgggaagggccaaggacgaagacgaggacgtgaagccggcgtcgaagcatcgccgcgccagtggcggcgtcggagagcgcaaggaatccgagaggtcactcgccaaggtacgccgcgggcccctccacgttcttccgtttgcagcctccaaccactgatctctcgccccgatcacgtcccgcgtgccgagtttgacaagccgccgccgccgccccgtgtagttacttttacgccgcgcattcactcccgttgctatcggtccaggtcctgcgccagacggaggagctggagacggaggcagacccgtcgccgggccccagcgccaagtacaggcaagccgacaccgacacgccagccgacctggaggccctcctgccgcacggggcgctgctcggccatcgagccgcccggcaatggaggcccgc

SEQ ID NO: 8211 - DNA, 1144 bp, Zea mays
ttgcatgcctgcagcagataaaccaaaaacatggaagaacaagtcaggtcatccctattgaggtaattgaccgaccaacttggccaaccaaattgggcaaaaaggcgcatgcattgctttcttgttgcatgggaaggttgacttgaagagcaagaacttgctttaagtctcatcacatcttatgcatgggcaataagacaagcacacgaacagaatgcaagaggagcacaccatccacatttggcaccaatgccaccacaactgcatgctgctccggtggaaatggaagccgctgtggctcctttggcagtggaggtggagacggatggcagcacggtggctcctttggcgacggaggtggggacagttgctcctgcggcaatggaggtggggacggacggcacggtggctccttcggcaatggaggtggagatggaatgcgctgtggctcctctggcaccacctccacacgctgaggctcctccaccacggccacggcagaatcctcattctcctcctccccctttgtcgttgtccttgtcaacattttcgtcagcctccaaatcagcaacattttcgtcagcctccaaatcaggcggccgaggcgatggcggcgctggtggcgccagcaccctgccggtctcctccccgagggcgccgcagaaggcgcgatgcgtcacgaagctgtcccgtctgaaccaagccagtgcggcacccgatgaatcaaacaatgaaaaaacgcaagcttagtttcccccgaatcgggcggaggatgaggaagaagagaagaaaagaaaagcgaagcgggaagcggcgggaaaaaaaaacgatgacgcacctggtgaagagcgtgccgcagtcgcagcggtactcgcgggtgccgcaggtcttggcgtgcgccttgaggtcggcctggacggcgtatcgcttggcgcagcgcgggcacgcccagcgcttctccccgtgcttgcggcagaagtgcttcttgatcccggtgaggtccccgagcgcccgcgcgggggagtggtgcacgcaggcgggctcggggcacacgtacacccggcggcgcggcggcggcgcgcccggaccacgctgccgcaggcgccagggcaggtgtggccgcggagaggcaagtgcaggcagc

SEQ ID NO: 8212 - DNA, 1177 bp, Zea mays
cagcttgcatgcctgcagatggtctcatttgattcatttcctaccaatacgcagaagatagccacaaaaagcgttacatgacatcaccgtcaagagctcaccttggaaaggcgaggcttcctgccttccaggggtgatgtggcctccccgccagcgtcttctggcgggttgatcacctcgctctcgcctgacttgtcctcattgtccttctcctcatgctcttcctcaccctgcccccctaagctagagagcattgcgggcttcccactggccgcatcctcgacggcgaccgccgcatccgttgcacagatgatgtcatcaaccgcatcgcccatctcgaccaagccgccactgatccaccgccgagggaaacgaggtgcacgcgagatcagaaacgccgaatgcgccgcagatctgggccaagcaaccgcaagagaaatcccggtggcacctatggggctggagggggtgggagaatgtttctttacctcgcccgtggggaatgctagggaatgacggtgcggaggagcacagcgagaggggtaagggaggcggcggcccgccggcttccgcggagaagggccgcctgtggcgatggaaggagaggtgacagcgggggatgtaggtgctcgtggctgtgtttgggccggagctggttagttacccgtcgttccaatctcgctgtcttttcagtgttcccttttccgtttgtttctccatatatactgtttgcttttagccttaaaaagaatctcgtggtctcatggaaaaagggctagaataccaaatgctacctaagaccttctgtcatcaagattggattacaaagctgatgaatttggtagaaattttaggtacaaattcatctataaagtaacatgaattagaatgacatatgtgattaaaagtaacaatgctatttcatatgtgattaatttagagtccatctgaaagaagaactcgcatgcaagaactagaaaaaaagaaataagaaaggaacgaagatataccctatagcatagcagaaccagtgaccagagaaacttttccgtgaaaggtatactctatagcgaggctcatgccaagggtattggagacgttgttctgcggatcagttgacatgattgtactacaaccattcaacatggttgaatagtggtgatgtagtgaagatgtc

SEQ ID NO: 8213 - DNA, 1106 bp, Zea mays
cttgcatgcctgcaggaacgccgccgccgggccgccgcggccggagccggagccagagacagagccaggcggcgcctgctccggcacgctgaactcgtccgagtcggagtagccctccatcatgctctccagccggacgaagaagaggacgcagtcgaacagcatcctctcgaagtcctcgtccctcttgtgcaggtccttgtacccgtacctcgccacgcaccggaacatgtggaagtccctgggcccgatcctccgcaccaggaaccgctcctccgtcggcaccgtgtacacggggaggtacttgacgcacacgaacaccaccaccgagtggatcgcgggcaggttggtgatgaagtgggagaagatgtgcggcacgccgctcgccagctccgtgtacacgaacccgatcccggggaccctcaccaggcccaggctcgggcccaggcccaggatccacgccatggacaccttgctgtgcatctcgaactcgtaccgcttcaccgtgcagaaatgccacacgtacatgatgaggaagaaggccgtcgccaccaccagcggcacccagccgccctggtcgatcttcagtatgcaggccacgaagtagggaacctccaccatcagcgacagcacgatgaaggtcaccacgaggatccagtggctcttccataccagcagcattattggcaccatgaggaatgtcgtgactagcatgactataaccaccgcagtacctgctcatgttgtttttttttcaatatgaaaaataaaaacagacggttaattgttgtctgataatgtacagtaatatcatgaaagtgttcagtaccatctagatgtttgttctcatttttgagagagaaaactatgtattttagttctcagaggaaaccttaccgtatgcgtttcctatctggctttggttcttgaatccagcagtcacagcaatgcagagaaccagaaggatccagttgatgtcagggatgtagatctgtccaaggaatttcttcgaggtgtggacgatcttcacgcgggggaagcaacccagcgcaagagcctgctttatgatcgagtaggttgcggatatggtggcttgactggcaaca

SEQ ID NO: 8214 - DNA, 1406 bp, Zea mays
ctagcttgcatgcctgcagctgcaacgactgtcaactgttctggcgcagaaacgtcttctgttttctcttctccttttatattatgtgcttcgctcgaacgctggattcctgcacgctggatcggagaaccgaagaagggatggtcttgtcgatctggagtcgtaatccatcacgtctgctcgaacggtgttgtgtggaagcaaagttcgtccagctagctctgttgctgctcagtagatttgtgttagggggtgtttggttgctcctgctaaagtttagcccgggtcacatcaagcgtttgacttttaaataggagtatgaaatatagatccaaccaactggactagattcgtctcgtcttttaatcttcggctgacaaattagttttataatccgactacatttaatacccggaacggaggttcaaacattcgatgagacaggggctaaattttagcggggtgtaaccaaatacccccttagtcgttcgctagcctatatagatggccaaacggacgaccctgcccggcactggcacgacacggttagagcacggctcgtttgacccgtttaatagtcgtgccgtgtcgacacagcactagtgcctaagaccaggcccaagcacggcactaaaccttcttagccatgccgtaccggcacggtgggcccgaccagccagtagtgccatggccggcccgagcactacgccacagaaactcatacattcataaatacacttaaagcatactaaaatatataatcgggcctaaacgtgcttttgagataatcggactgtgcccgtgccgggccggcccaccatgctcgacactcgacccagtcacggcactagctagccatcgggttgtgccggcacaggcccagctccaaccgtgccgtgtcgtgccgtgcctgggcactatgggccgtgccgtgctccggacctgcccgattaatccggcactattgaccatctatactagcctctgtgtgcaatgattaattaaactccaagcttgaacgagaagaagaagaacgctagctgcttattaccactcgaacggtgagacgtcggcgcagttgacgaacatgtactggccgctcttgtagctgaagcccggcggcttggagaagtggagcgagagcacgtcgcccgggtacacggccaccttgaggatcctcacggcgcggaccctggagcggagcgcccgcgtgaggcgctcgcacgcgtacagcaccatgggcacggccaggtacatccacgtcgacttcttgtaccacttgtgcgtcaggtacaggtagtgcccgtgcaccagcagcagcgcgtacaccgccacgaagcagtggtgcgtgtaccagaacgcgttgaaacccgtcagccgcttcagcgggcctgcaggcatgcaag

SEQ ID NO: 8215 - DNA, 1141 bp, Zea mays
cttgcatgcctgcagtggctttttttagtgctattaaaggccaaagaagccccatcattttaatcaagtaactaactacctattctactctatatcagattttggagactgattcataaagaagagactcgtcagaaaataaacgatatttgtcgctctttggaggtggtagctctagagacttttgtaaaacataagtgacggtttaatgcgagaatcacagtgtctctgtgatttttcagtctatagcttacattacacttcaagatttgtgtggactattatgtaaggccgtatgcaattgcaagcatatgcaaaaggtcggaactgattttttttctccattatataaaagataagtgcactggttgaccccatgtcatgtttggatattgaagacgtcaaacttttcggaagtgaggggacacagtgaaggagtgcacaatagaaaaagcaatgcagacaaaaagaaaaagaatgaacctaagttttttttagtgcagaaaaaaaaacgcagttgatgaagattgcccccatattacaacgactaattcttgcccgtatcaatattaaaatatattaaaccgtatcatgattctggaatgctgatcagcggatatccacaccgcccgagcaagttcccaacagcatattcccaacggcatatcccaagttcgtgattggcttctagtactgccgtgcctagtgttcgttccccaggctccactatcagtccgttctctcgcttcgcttctactctcccccgcatgcttgcttgctccttcctatcttgctgcccgctccacccgagtctgccacacgcccacacgtctaccggagttcccgctgtcatcagtccccacgtatgaagcccaagcaggggtgcaactgcaacacggggtagcttcgcggcgacctgcgaggctgtgactgtgagtaaccagcctttcattcttctcacccagcctgttctgttttttgagtctcggtggtgcgcgccacctgtttcttttagtagtagtgctcagttagtgatgctcgtctgttcagagtttcattgttcgggagctagatcgttcaggtcagcaagattagaccttggattgcccccatttgctctctcatactgcaggcatgcaag

SEQ ID NO: 8216 - DNA, 1160 bp, Zea mays
tgcatgcctgcagtaggccactatcatctgctttgatgaagaggttattgagaacatccatgactagaacaaacaagagaggggaaagagggtatccctgcctcaaccctctcctattgctaatagaatgtccaggttccccatttaccagaatttgcattgaagaagtcttgaggaggttgaaaaccatactgcaccaagagtccaagactgtccaaaacaccagtgatgaagaacttccagcaggaaagcccagctaacagaatcaaaggccttcataatatcaagttttaaaaagagggaagggattcccttcctgtggagcatcctgacagtattgcttaccatgataaaattgtcatggatacatctaccccgaataaaggcgctttggttagtgcttaccaatctgtctatttcaggagccaatctatttgccatgattttaataattaactttgcaaaactgtgaaccaggctgacgggcctataatcacctgggtgtaaagcctctgcctgtttgggaatgagagtgagataagccgaatttaatagccataacctttcagaggctccttgttggatagtcaggacggctgcccaaatgtcctatttgattgtattccaacaagacttgtagaagcgacctgtgaagccatcaggtccaggggcccgatcattaggaaggctatttatagcaatttttatctccatggatatgggattatcaagagctgccaagtcaaaattccccttatgaaaagctgcaaaatccagactaaagtcccttctgacctctttgccgaacagattgctatagaattgaaacatagtgtgctgcttgtcctcttgcgaggtgagatattgatcatcaacaaccaatttatggatgaaattcttccttttcctgaatctagagaaagcatgaaagaaggctgaattagcatcaccagctttgacaaacctcactcttgatcttaatctagagatggttctgctcaagaatgaaagtttgagacacaataatttgctttgcttccttaaccaatcttcagcacgccagagtggtctactgtcttgggcaacctccaataaatgtacagtttcttttgccagtgccagctgagaagaaacatgaccaacttttttatggctccaag

SEQ ID NO: 8217 - DNA, 1165 bp, Zea mays
aggacgaggcggatccggtgcgtttccacagcacgagaggcgcaggtactgagaggtacatgtacatgtacatgccagtaggattcgagcaggcaagtagcactagtagcttccgatccggagcccgtcaaggctgcgaccagaccagagaccaccgaaatatgctcgcctccggcggcaggaaggcacgggagtaaagccaactcaaggaataactaacgggtgccgcgctgtaagccgcgaagcgagcacgacaggaatccgcgaggtcaggagtcaaaaacccaaaaccaaaagggcaggcagagcatcagggtgcgcagagcccggctgctggactagagcccaagcaacgaacatgccacgcgctgtgcctgtgccttgacctcagagcactctacagagccagctgtgcctcctgtaagtcctaatcatggctaaagtctaaagacacaggccctcgttccaaggctgacaatccggacgcttcggttcttgtttaacattctgaatgttcacaacttcacagcctcacacaggttgctgctggtctactgcgtctgcgtgcgtaggtgacgagatgcagtttactagtgattagtagtgaggatggtagccccagcccggacagctgtccggagccaaggatggatggacggggtcttgggtgccaccgggaatcaatgccctgtagctgcacgagtacggaaaccttttttcaatggaaagaggaggagcgccgaggaaaattattagatccgaggacgtcgatgattgtatctacgtacgcgagtccacgacggaatcggaattaggcgactagctttcttgggacaacggacggaagatacagcgggtgacaccgtgacaggagagaagaatccagaatcctttctccaaacgggacgaagaaaagtgtgttacctgctgaacccaagcccctttctggagctcaacaaggcgctaagcatgtcttccggacagaaggcaagtcacttgtgtgccacgctgcctacctgatcgactggcctctccatccagtatgattttgcaggcatttagcatgtcatggaaagaacactctgttgtaacggactaaacggtagttgcataccgcgcagcagacggggtcagcggtattgaatggcgaacgtgcttatatgct

SEQ ID NO: 8218 - DNA, 1115 bp, Zea mays
aaaaaggagagcgccaaaagaaagaaagaggatcacaactcgtctaagaaaagcaaggacaaaaaggtttccaaatatttttcctgattgtactccatttaaatcaattgttgcagtaatttccacacataacagatatctggttgcacagtgtcactatatgtgtgtgtgttcctatcacacactccttaaattagagatttgcactgacagctaccaatttatgtaggagaaggtttcagattcttcgtcgaaaccacctgtgcatatggtgggtaggcctaatgttcctccataccctcttccagttcttccaatggacgatgatgaaatctcatccaaaggtaaatcagataaatatttactccattattggtatggcagtgtaaggattggtgtttgcatgatttaacattctgttttgttttggatagttctacttctaccactctaaagtgatgtagtgactgctacttgctactatcatatgcttgtttatagcaatagaatccattgtgtattggtttccgcagtatatctgagacatcaaaaccagaaaccaactgacgtggtctttaaaaatatagtgacatatcatgtagtctgattctgggcaatgctactgctacaaaaggggaagtgtgttggtaggtgcagttccctttcatgcgtaatttgtggtagagattgacaattcacttcatgagtcatcatttgctattgtggtctttttcatacaagtttctctcacatcagacacaaatcaattaatttgaactataattttgtattgaaatcttcaaaggataattttatatccttgaggtgctaggactaggaatatagataggtccaggaattgcagattgtactctttttgacatatggacggtgcatactagatgacaatcactatttacagttgccctgcttctctggtttttttacatgattctttatctggcaatacattgtgggaatctacagataactgcttgacatatttgacatgttttttctactctatggaattttaaatttgatggaagttcttgagtcgcttgtctcatgggcaattgactaaatacttattagttattcatccttttcatctt

SEQ ID NO: 8219 - DNA, 755 bp, Zea mays
  unsure (1)..(755): unsure at all n locations
agcttgcatgcctgcagaatgttttcttttttttttataagcttgcgaatccaacaaggatggtggcggctatatatatatgtgtgtgtgacttgtttgtctgaacaagaaagagagagcagcacgctgcatgctggaaactggaaggaatgcttgctcactcacactcacctgtcgtctgggcatcggcttgacgggggccggggagtactgcatttgcatgtagccgctcaaagcagccccgtttaagggagactgcaagaacaaggaaaatgcacaacaaaactgaaattagtcgcggcaccgtgtaataagcgagcgcaaacgaacggctgcgggggtagtgggtggcgcaccttgaatcccgtcgtggtggagaaggcgtacgagaagtcggcggcattgcccatctctgtcatctgggcatcatcagcgccgccatagccgccgttggcctcccccgagctcgtcgcctgggaaattaaggagcatatacatggcgtcgtcaccaatcacgaaggacagaggtgggattgcaagcacgacgcgtacgcgcaacgcgtgggcaggggcacgccacgtgctaccacccaccctaccttggagtaaacaaagaagggcggcgagctggccgtgttcttgagcagagacgacgccgcggggggcggcgggcccttttgttttttctgccgccttcgccgggggcgggcggttttcctcaacgcccttnccctttttctttttccgcaatttgg

SEQ ID NO: 8220 - DNA, 1155 bp, Zea mays
atcatgaggtttgccgtcgtccatccctaagcaacgggcgcggcatcggcgcatactgtagcgaaacctgcaagaaggtgtatacctgctgagtgctgcctagtctctccacttcatttggtttcttgtcggccgtatcagatctgttctgtctttttttttcaggtgtctgctcggttatcagacatggtaggcgtaacaaaccacaccgaagatggtttctcatgggctctgctgaagatccagaaagacgaggccgtcagttcacaggacattgctgctgttcttgaatgcaacgtgaagcttgcggtggcgcttggcgtgctgaacgagtgcttcaacccggccaaggatcgccgaactaagatcgatatgctccaccaagctgtctacagcctcgggtaagttcagtcagtcagcactgaaacatctgcgtctcttttcagttcttcgatagcaaaaaaggtttgtgcttcaacagatcagaattcaaacgggtgagctacgaaggattctacaccatggttctggacaaggatggggaaaccattgcagcagccctgctgaggtttggattcaggagtacttgtcagtgttcctggcctagtcgttgttgtatattactgtaagcaaaggtcttcttcttcttcttttttacaggatccatggcacaaaggtcgccgagatgccgttcgctgccacgctgccagcttaccggaaacaagggatgatgcgtcggctggtgaacgctgtcgagcaggtaggaggagcacgacactgtctgcctgcctgcctttctgtatgccactgtcactgttcaccaggtgtgagtgtgaagcaggtgctggcgtcagtgcaagtggacaagctggtgataccggccatagctgctctggtggacacctggacgaggtccttctccttcaggcccctgctggaccccgagtcgagggaggaaatcaggaggcggagtctggtggtcatcgccggcaccaccctgctccacaaacccgtggccgccgcgcggccgccgtcgccacacagacacgctgaagcagcggcgccgaagaatgcagggctgccgtggtggtggaagtacacgcagcaggcgccgccgctcacggacgacgagctggccttcctggacacggcgcc

SEQ ID NO: 8221 - DNA, 858 bp, Zea mays
atgtcgggcatagctgttgtagggagagattactatggtgtatttcctctcaggggaaaactattgaatgtcagagaggcaaaccacaagcagataatggacaacgctgaaattcagaacataaagcaaatccttggtttgcagcatggaaagcagtatgatagcaccaaaggtttaagatacggccatctcatgataatgacagatcaggtttggcatatagctccaattctatatcaaccaatcaaactcaagttttgtctgctcatgctttgacaaacaaacttcaggatcatgatggttcccacatcaaagggttgctgatcaatttcattcactcattctggccatcacttcttaaagttccatctttcttggttgagttcattactccaattatcaaggtatataacagttggggtttatctttgggcatatttttatgcatttttaacttttattcttgatcctttagtaatgagcaccgcaggcattttttccctgacagatttgtaatttttgtaaaacatgtgtttgactgccatgatgatacttgaattcatactcatttgaccaggcaaccagaggccaaactaccaagtcattctacacgttgccagagtatgaagaaaggagaaataatttaggagcaagtgcaacgtcatggactataaaaaactacaaggtctgcttgtccccgcttggatcctataagttaacttcttcctgggggccattttgctggaaggaaggccattcatttaattaatggtagggccaagtcatttctaaaaccgggaatcaattaaattatgttaccaaggtgggttcaagggaagacacaagccaccaagtccc

SEQ ID NO: 8222 - DNA, 1187 bp, Zea mays
ttgcatgcctgcagcagcttttcagaaaaaactctaaaagttgcagctcaaacaaacagggcctaagactatgcgcaattaaagctttgtttgaaagggaaatgttacaaataatggaggtcaaatagttttcctacaaggctaaaattataaaacagagaggattaactcgtgataatacaataccaataaaatttctccctctttgcaatcaaggccaattcattaagaaacataacaggcatagttattaaggcggtaaggcgaccaaccccctttttatcttttaggcggtaaagcgcaaggagaggcgaggccttaataatatagataaatataaaaattagactaaatattatatatatatcactaatttaaagttaataagtaagctagcacaactgtaaaacctattagatccatttcagtttagtagaagggagaaatagggaaaaaagaaagaaaaacagcccacaacagcctaacccagtccaacacactagaaaccctaaaacatgccacacccacagccgctctcctatccctcagccgccagcacagttgacagctcttctctctccctccctcacacagccactctccactacctctccctctctcatgcacctctttgtctccctctcacccacgcctctcctctctccctctccctctccctcacccctgtgcctctcctctatctctcctcccctgcgccgcagttgcacctctatacgccgctgctttttgcatcgcctgtgcgccgctgccgcccgcgccccgccgccgtcgggcctcctcgtggcaaggcgagaggacgccttacgactcgagcgcgccttaccgcataagcgtcgctaaagcgacgctttttagtgacgcattaattactatgataacaggagaatccaaaagcatcagtagtctataaaaataattgtacgtcggcagtgcacagggaaaatttaaaaaatacttcctgcaagtaattaaaagcaacatacaaatattatgttctttttttctaaaaaacacttatctataaaaataataacttaacggctcaggttttagcagactaacctgagcataatccaagcaacagtatgaatgtgtgtgcagctttactttctctactccctccttagcaattggttgaccatcattagcagctgcaggcatgcaag

SEQ ID NO: 8223 - DNA, 1140 bp, Zea mays
cttgctgcctgcagggcttcttgatatactgctctctcagcgtaatctaagaccctattttcaggattaaggcgactgtgtgtctcaaagcccttagcaacttcactgttattagaattggttgcctcaaacgttgaaggcagtaccctatgtgagctagaacctccatatacaatgacatcatctgccatataaaaaggggtaaagattaatcttactacagaaaatctacaccattttccaatgcttgtgttattgatcaaattacatcatgtgatgctagcatacccaccatcatcatccactttatgggtattaagtgtactagaagttcctcttgccattattgaagatgaaggctgcaaatttccattggcaatatttgtccccattctgttttcaccaatatttggtgactttttggtggataaaggcagtgggagcttgcgtgtttcgctagcaacaattggatgcatagattttgatgtgttgccatttgaaaaggatgatggaaggaccctcttgttattgtcatttgcatctgctgtagaactgttgtgcttttccactacgctatcaattctactggaagtagaatggcccggtcgcatagccatataaggatttgcatggggatgaatcctgtccactgaaccaaatgtataacgactactctcagcatgtctaccattcgtaagggatgctggaagaatcctgtattgaccattgttgttctcagtaggcttagtcgatggtggagcaggagcgctcctttgccaatcttcatcctcaaaattgattattcgtccttcagcattttgatcaagccttgcgattgcagacgctggctggtcgtcatcatcgaatattgagccaattgagtcatcatcactatccgaaataataatggcagagttttcattcatattgccagcaagcacgtgcactgtatatgtgttcttagaactttgtttttcttagcatgactaaaccattcatgaaccaatggtttgctttctatcttacagaaataaacagcacttccttttttcagatgatcaccaagctaaaagagagagcacaccacccatctcagagtagcactcacagttattcgagttaccctcactgtgggagtaa

SEQ ID NO: 8224 - DNA, 1088 bp, Zea mays
cttgcatgcctgcaggaggagcgctcaaaggctagacgctttgatgttgattctggaactaccgaagaagatcgtaagctaaggtgtgtcgctaattcacctagaactggaacaaaaaaataataatgagctgttgctttttgtttcctgcttcaaccatgtcgtgtatcttgtgcaggaaggaacatgtacagaagttcattgattgccaggtcaagaatgtggcagagtttgaagctgagcgggatgagctgatcaaaggccacgaggagaagaagatgaagctcaagaaacaatacatggagaaggagctggagctggagagggatcacgacgcagccctgacggccctgatggagaagcataagccagatacttttgaggcctccagctcgtgaataggcttcagcgagatattcaatagatgttgctaaaacatggtgtctgttgtggtagtgtgcgtgatatggagacatgacatgaccaacaccgcgttatatgatcgtactgtgtggttcgagcatctgaacactgagcgtattgcctgtgaggctgtgatggcatatggggtcaaaccacagcttcgattttgccctctaagccatctctatagactgctgtctatagagtaaagagtttgtaacatgaagtgagatagggaagccatctctagcagtttactcatactcatattcaaacttcattctatgagcagtgcggtctacagtgcaaacagtgttttaggtaactacacttgagttcattaaacctttttagttcgtctattgattgtgtagtattaattgctgctgcttgtgaaatgattttctattataaaccaaaaaattattcatttaattctattttgaccagtgaagatgatactatgagttaacttgtctccagaattgtgtttgttcaaactagtagtggtaaataagtcaaactttatcaagttggtagacataatgttcaagtaccttggctagttagctaatttttgttggccatgtctcaaaaactgttgatggacacttagccgggtctaactgttgaagtgtccaacagtgttgtccaaccgagacaac

SEQ ID NO: 8225 - DNA, 1170 bp, Zea mays
tgcatgcctgcaggattgttagctgtttttcttggcaagaaaacatgcacatgttcatgttgcattcttgtttgtgcgtgtgttctttttgccgtgacatgtagagacacccgtagactgcatctgcatcgatctccggcgtttcaggggtttagttttgagtagtggcagcccacaaattccggcagatctccgagagtggaggaggaggtggcggtcgctccgtcgacgggcttccctccatcactctcctgctgcccgtcttgtgcggatcctgaacaagccaccacgcctcgtcttgtgctcttctcctctcgatcgcgcatgtcctgtcctgacctgaccggcccatcgccatcgccatagcatcgggggtcgagcagctcggcgaaatgatgcagctgggctgaggagagcggtcgatcgagagatcatccatcggggtcagggactcagggtgtgagcgagggtgtaggtagggtgggtaaagatggacaagatggagagctacctgaacgagaacttcgggggcgtcaaggcgaagcactcgtcggacgaggcgctggggcgatggcggagcgtcgtcggcgtcgtcaagaaccccaccaggcggttccgcttcaccgccaacctgggcaagcgctccgaggccgccgccatgaagcgatccaaccaggagaagctgcgggtcgccgtgctcgtctccaaggccgcgctccagttcatccacggcctgccgccgcagggcgactacgccgtgcccgccgacgtcaaggcggccggcttcggcatctgcgccgaggagctgagcttcatcgtggagagccacgacgtgaagaagctcaagtcccacggcggcgtggacggcctcctgtccaggctgtccacctcggcgtccgacggcctcgacggtagcaagctgatggcggcccggcaggagctcttcggcgtcaaccgcttcgccgaggcggagccccgcagcttctgggtcttcgtctgggaggcgctccaggacatgacgctcatgatcctggccgcctgcgcgctcgtctccctcgtcgtcggcatcgccaccgaggggtggccccacggcgcgcacgacgggctcggcatcgtcgccagcatcctgctcgtcgtcttcgtcaccgccaccagcgactaccgccagtc

SEQ ID NO: 8226 - DNA, 843 bp, Zea mays
gcatgcctgcaggcttggagtgctaaaaaggttgggcatatttcatcctctttagcccttgcccgtgtgctcctgcacaagttggaaattgttcaagacagtcgaagtctttccccagctgagctatggtttctcttatgccttaagaaacactcccttgctctatcttcacttcaaaggacaattgccaggcttcgttccagaattgggtggctgcgtgagggtgatgccaatactaaattattccacatgcattcaagatttcgcaagaagaagaattttgttccaaaattaatctctaatggtgctgtcctaaccagccatgatgccaaagctgatctggtcaacgaattctatggcaatcttttgggacaatgcagcgatagagagcaaactatctctctggaaagtttgggaattccttgtcatgatctgtcagccttagatgcaccattcactgagaaagaggtatgggacacaattttacatcttcctttggacaaggctccagggccagatgggttcacaggaaaattctatagagtctgctgggagattattaaggctgatgttatggctgttttctcggcggttgggagcaggaggttcgctaattttcagatccttaacactgcttatatcaccctcatcccaaagtttgagggggccgatcaagttaaaaatttcagacctataagtttagttcataatgttgcaaaattgctcactaaacttctcgctaaatgtttggctggaagacttcatgatttgggttttcctaaccaaagtgctttttttaaaggccggttcatttcaagataattatatgttggtgcaacaaat

SEQ ID NO: 8227 - DNA, 1162 bp, Zea mays
ggattctgtgagtcgacctgcaggaggtatcacttcagcttattcttagagttgtcagatattgccatgcccttcataagggttgctatcagcaaagtgagctctgcggtgtcctacttctgggtgtcaatgattggaaggtctcttgggctgattttctcagggattagacaatcactaggctggaaataagcttatacggtcatacctgttgagttttgagtctgacttctgggactgaatgaatgtctgttaggttatgcattgtaaatctttgagatggctgccatttttctctgctttctttttcatcttagcgtgtgagaaagtccattgattttgtggacggaatatgttaatctgtggattactgaaatccatccacatccagtctttctcaaaacagaaatcatgcacacgaaatatgtctagatgcatttttgtttttttttattcaagtgggacggaacatcatatttttctcgagacagaatggtaagcacagcatacattacgagcacgcatcattaattttgtacagggtttcatttctctccacccatacaatctggaacgaaatcatgtagtgtcaagaaatggaaaattcatccaaaaacgaaacaaaacggaactgaggaaacagccgtttcatcttgacgctatcagagatctgaaccagaggttcaatgttcttgcacttttccgcccttttcatttgtaatacatacggtgaatgaaacaatatataatgaatatgaacctacaatacatcactactgtgtaacaaaagtatatattacttttccgtccttttcatttgtaatacagacggtgaataaaagaatatcatgaatatgaacctacaatacatcactacttacaaaatcaactaagatcagtctgcatttggttgatttatgtcataaggcccctgaaaggaaaagagaagattgttagaaggtccatcataattgtcaatagatcatctgcaacgagctgcttgctgcacatgtacaaatctacgcaaaaaagcctagtacaaatctacgcaaaaagtctaatttgcaaagcaattggaactgaactctaaatttaagaaagcaagacagctagaaacaaaaggcgatgggaatacatcatcttacccttcatccttgtgcca

SEQ ID NO: 8228 - DNA, 844 bp, Zea mays
cgggtttcagctcatggaagacgcagggctcagcctgtacacgcaagccgaggagagggaccgcgggtctccggctccggcctcctctcgtgccagggctcacaacaggaactccttcagcatttcaagcacgcccaagctttccccatctgacgcttccgtctcaccttccatgagggcctacaagcagcttgtcgataggcttcgtgtcgacgagaacggagatcctgatcatcatcctgcggtacgatctctgatgcctcggaagcccggcgacgacgagctttcggcatccaccaccgacgccggggacgtgaacagcctccccgagtacgaggttgtggagaagggcgttgagacggttaaagaagtcgtccattaccaggctcaacgcgaggtgctgcgggagctcgactccattgccgagcagatcgaggccatcgaggcgctgatgaccaacggcgggaagaagtcgcccagggcggcgggtcagcagcagcgtctggacgcggatgaagagatggtgacggtggagtttcttaggaagctcgaggcggacggtgtcggcgacaagaagaagctcaggctgcccatgacgccgagatccgagccggcgtcgccagcaaggaaggcggcgacgactccgcccgtgggaccgggacttgggagcgggggcatttggcccttgccgtggcaaaacggccgtgaacgggcggggtttccttggtggtcccaatgaaaccccggtttcgaaccctgggccggcttgggaggaaccaagaaggatggggcccccctcaaaaagcttcggcccattgccaaggttggtcccaagggccctttt

SEQ ID NO: 8229 - DNA, 1144 bp, Zea mays
tgattgatgaaagcgaaggcatcagtcaggaggccttggataattatagtaggctttttgagcagcccctccctccatctcatgtccaggcccttgctgcccttttcggatggacaccccctgggttggcggtgtgttgagcggctgttcatgcctctatcctgttggtcgggatcttcttatatttgttatcatgaatccttcaaatattgtgtgttggaacgtacgaggcctaaattctagagctcggcaagactctgttcgtaatttggtaaactcctttaatgctaatgtggtgtgtatccaagaaaccaagatggctgaaatttctatgcatacctccctgtctgctcttgggagtaattttgtgcacaaattgtgtcttccctcagttggaaatagtggtgggattcttgtggcctggaggaatgaaattggtccagccagcgcttctcgggtggatcagcacagcgtgtcaattcagtttagtccaagtgatcatcctccttggtggttgacttgcgtgtatggacctcaaggcgacagtaacaaaattcagtttatgcaagaacttcgggatgtgagatctgcgtgtcctggcccctggattcttatgggggattttaatctcatctacagagatgaagacaagagctctggcaattttaacagacagcttatggagagattcagaaggttcattaatgatctgggtttaaaagaattggctctgcatggtcggaaattcacttggtctaatcgccaagatacgcctactctcgtcaaacttgatagaatgttttgctcatcagattgggagcagctttttcctaattgccttctgcaaagtgctagccctgacggttcggatcattgccctttgcttcttgggctccaggttttaacacatggtcgcagcagatttcattttgaatctcattggacaaaattgcctgattttattacaacagtggaggctgcttggaattctgttccttcctccccttgcacttttgaaaccctttccaagaagtttggagccaccgtcaggcgtctccaaagctggtctcaaaaaagggtgggccatatctcctctcagcttgggatggcgcgggaaattatgcacaagctgcaggcatgcaag

SEQ ID NO: 8230 - DNA, 1155 bp, Zea mays
cttgcatgcctgcagagacactgcgcagctgcctcgccctgctcgccgtcgcgctgtgcctcggcgccgccgcggtggcgcggggccagctgacggacgacttctacgacgactgctgcccccaggcggagaacatcgtgagggcgcgcgtgtccgccgcgatgaaggccgagccccgcatgggcgcctccctgctcaggctccatttccacgactgcttcgtcaacgtacgtacgatgatcaagacgccgcgcacacgctctctgttctgttgagagtcatgcgggcacacagcgcgagtgctcccagtcttgagcctagctaactcccagctaagtgtatatatatatgtgtaccgaatatttggtcgctgaaaaggacttgctcgctgcatgcacgcacgtacacgcaggggtgcgacgggtcgatcctgctggacgggaacaacaccgagaagctggcggggccgaacctgaactcggcgcgcggcttcgatgtcgtcgacgccatcaaggccgacctcgagaaggcgtgtcccggggtcgtctcctgcgccgacatcctcgccatcgcggctaagtacggagtgctgctggtgtgtcccttcccttctcatcttccctcatgatttcagtactacgatacttggtgcttgggggccatgcatccatagatccgtcgcgctgaaaaagaaaacctgtactgtactgtactgacgcagagcggagggccggactacgacgtgctgctgggaaggagggacggcctggtggcaaaccagtccggcgccaacagcaacctgcctagcccgttcgatcccatcagcaccatcacaaagaagttcagcgatgtgggtctcaacacaaccgacgtggtcgttttatcaggtaccgtagtacgcatcttaatttcactgcacaacactacttcgtccctctccgtccctactagctgaactgacctggcgtcagtaagagcgatgatggtgactgcataactaactggacggacggacggacacgcacgcaggaggccacacgatcgggcgagcgcggtgcgtgctgttcagcggccggctggccaacttctcggcgacgagctccgtggacccgacgctgaacgcgtccctggcgtccagccctgcaggcatgcaag

SEQ ID NO: 8231 - DNA, 722 bp, Zea mays
cttgcatgcctgcagtcgcgttgtcgccgctgatcggcagtcagactccacctttgccgtgagtagatcactagctggaggatagcagatcgggcctgctccagatctgccctggcacgagcgagctcctcacgccatgtgcgtacatcgtccgcagcagaagtcatggaaaggatacctgactcatgataccatatgttatgaatcctagtcagcgccgggaaggtagccgggcagagtcagcatgggagggactagactattggagagatctaggactaattcttcttcattcctttttcttcttaaggaggtacagttcatccttatatagataggaagacttggatcccaagtaactaactcaatattatctaatctaatcccaagtaactaactcaatcttatccaatctaagcctccatgccctgggttgccgccccatgacaaaataccacactcatatagtaccttactatatgtaatcacttgtagtaatgaaatccatgtaaataaaaaccagcaacctgaatatatgtacattgctatgatattgctattagaaggaaaaacatatatgcatatgatcaagaaaggaagctaacagagcgggatggtgcatatatttaggaggtgtctggcttgaggaatcactccatccaagatgcggcggtgcatgatgaatctattcctcaaagttggtgggatggcctcattcctcg

SEQ ID NO: 8232 - DNA, 1208 bp, Zea mays
gagatgacggtctcaaacgcgccaacgagtgccttcaccttgctctttctcgcctcagcgacgagccggctcgccgtctcctcaatcacgttgttgaacagccctggctcctgcttttttgtctccttcccgtcctgccgccgcagcacaacgatctcggcacctgggtctgtcgctacagcgccgccgccgccgctcctcttgcttgtgatcctgccgcctctgttcctggatgccgcgtctgccatggctacggaaggcctgaaccggagccgtctcggggtgcagccactgttctcttcagggttcagtactttgccccgccggaacgtcagcttgcgaggcgactgcactggcagcacggtgctcgagagggtgggcggggcaggctttgatctccttgcagtgtcaattttttctgtagaaacaggaggtgaaaattcgtcatcctcatgtagtgagcaaaaacttaattttacatagaaagaacatttgccgacaataaagacctatgttggcttcagaaccattattatttaccaaaagatgagaaaagaatttaccctaaaaatttataagtaaacttacattaaggagaagaaatgcaccagaaatttgcatagagaaacagaaatgcgcacaaactcattcagaaaaaaaaaattgcatcgtgtagagtagaaatgcacaattttgtgaatccgtacctttgtcaggtccgatctctttagtctccagtttgcgcactctcggtgaagccgtcttcagaattctcgaattttctgttccagaaacctttttgctgctattgattgggggagcaattttctcttttctgactgttctcagcttaacactcgagagaaacttgctagacatgtttatagatcgagacagtttcagtggacctgttttaaccttgtcttctctcttccttggaaggatttgagcattgttgccaactttgttccctgtcttctttctgtcggtacgtttccctgaagtaagtgatggggatgacagagtttttgttgtacaacccgttagctttgccaatctagaaggttccgcagatgaaccctttgtgacatatgctgggggtgacttgatctccttaacttttttcacagctgatgtaactgtaggcctgatttttctctctgggttactgaacttggtggtagaagtaacatctgcaggcatgcaag

SEQ ID NO: 8233 - DNA, 1142 bp, Zea mays
gcaaagagaataagatatgacagatgctgcaacatgtctgtgtgctttggcacttggcagcagcagcagaagaaaagaaaaaaacacacacatactgacatacacaagcactttcgtccaaatcaaagcctgcaaataaacagccaaaatgcctgccttggtttctctgacgacgctacgtacgcgtctcgtcttgctcatctacatacacaacagctgtgtaagctgtatgtaatcacagaagcgacaacgtctaacagctgcgatacgaaattgacagattggatcactgctagtcctagtatctagctcccctttctctttgttaactaccttttttatttctctctttattattacaattattacccgccagttttgagcagcagctggagctagtagccagcaataaaccaataataatgtagtgcgccgccccctcgtgcatgccgtgtgacagatcctcagcatgcgcgaccaatggaactgctacagagcaacgtcagaagaacccagcggcgacaacgaccagagcttccgccgccgcaggcggcagcagcagctcttcttctccatgaggcagtgctcgctcgtcagagggaccgacgaggtggaggtgcacatggcggcgtcgtcggggacgtcggcagcccagcagcaggtcccgagcttcacggtgcagggcagcttctggaggaggagctgcaatatccggcgcggcggcgacggcgacggcgacggcgaggaggtggcgaggataagcaggaagaaggccgcaggagcggcgccggcgcccgtcacgctcggggaagacgtgttcagcctcaccgtcgtgcccggcgctgactgcgccatggtcatggctttcgtcgtcgtcatggaccgcatctgccagcggccgtacagacccttgatgtgctctgcctcctcgtcgtaggccatgctgctgtggcgctctgttaattcagacatgtagggatttgtagttgctaactgcgcgcaggatgttgccgactgactgactggacagataagaaccagcctaaacatgcatgataatgttgtaagctgatgtttttattttagagcaaaaaaaaaagaaaaagaaagaagatgatggtgattcagatgaacctatacaa

SEQ ID NO: 8234 - DNA, 1250 bp, Zea mays
atcttgcatgcctgcagctctcctctttcaccctgcgcactgccatgacctgcatgccgccctgccgtaacctgctcgctctgccgtgctgccgctgcctgagagggagcagagcatgcgcgccgccgaggacgcgccctgctcgccctgccgccgtgccctgcccaccgctgcccgtgcccaaggcgtcgatccgatgacgctctgacgacgccagcagacgccttatacccccagagcaaggcgaggtagacgcctcaccctccatgaacgctttagcgcctaggcgacgcttcacggacgccttaataagcatgttcacaatggactcacataaacaagtcaaagacattgtagtggctaaggtataggttttgaacgaaaccaacctatattgcctatgtttgattgcgcaaagcaacctatattgtctatgtttgatcgtcgttgtgttgtggtgcccaagggctacaagaaagggtacacacaaatacaagaaacatcctacaccagaaggaaaatgcaatgctataataatgcaatactgttagaacagagcagtggaaaaaaatcaaaggtaacaaaccattaactcaactgttgcatggcgactaacaaactgcacctctttaaggctataacaatagcaagcaccaaaacaaacataagagccaaacagaacaaataataacaaggttcaacgggattatcccctgttctgctgttcagtgttcatcactcttaacatcaccgattgcttaggcaccagcgttttacaagcagcagattactcggactcatagcctctgagactaaggagttcgatggccaagcatatactatcaatataatcaatgataataatgattaaaaagagctcaagtaactgcctgcggatgtcattggcgatgactgtgacggggtcctctggcggagcagcgttgatgtcaagctcaactgcacctagcttccagcgggtggagcgagcgccacgcctctcacacgcagggcagatccagtcctcgttggcggcggcacggggccgccgggcgccaggggggccgggtggcgggggcggggggaagagaggcggccagacgcggacgcagttgggatggaaccccctgtcacacgcgtcgcagaccaaggttccccccagaatctcctggcgaccgcaggacgagcagggggccggcgggttgccccaacccgcctccccagggtgaggcgacggcggctgcaggcatgca

SEQ ID NO: 8235 - DNA, 1192 bp, Zea mays
cttgcatgcctgcagtcatcacatcctgatgatccacatattgttgttctcaaacacaatgtttggcgtgtgaagggtatcatccaggtagacaaaaatattatcaggttgctaattatttactcaattgtgtacacacgtctagacaattaatctttgatttttgagctttgatgtcatctattgctctcgtccatagttattaaggcggtaaggcgagacataaggtgtccgacccctttttaccttttaggcggtaaagcgtaaggctaggcgacaccttatttatagaataatataaaaaaattagtatatcacttagaccaaatagcatagaatttgttggcaactttccacaactttcaacaacttccctatttcgtcccttagcccgtcaccttccctattccctattctgttaaaattgaaaaagaaaagggaaggaaaagtaaatgagagatggatatgcttcaattcaaatgcccatccaacccacttagatcaccaccaagccaccacacatataccctaatccagttctcatgcacacacagtcagaagatgggcgggcgaagcaagaggaagcacgcgcgcgctgtcgctaagggagaacggagccgcaccgccgtggaaggttggactggcgggcagagcaggagggtcgtgccactgcggaagagggttgctgccaccacctagggatgtaaatggtacgaatattatccgtccatattcgatttcgatccgtctaataagagggctgggatccgatccgtattcgagtccaggtttttagtatctgatccgtgtccgatttatactcaaagttggatattagggtccatcatcagctgtcagtaatcactgtgatacttttcatatatgtcaaaatttatgtggatggtaaaatgtaacttgtggtgcagtatactatgccactatctaatactgtcactcctcgcccttaaccctcattgtacagcttcagcctttcactttaatgaaaagtgagtgccccaaccatgtctaggagaaatgatgtatttagtgctgctattgtttatttcttcacaaaaccatcaagctagcttgcaccctcattttctattgttggttcttattcatgtagctttgtcagcatactttgtgtgatatttttatgaggtgagagtcatttctgcaggcatgcaag

SEQ ID NO: 8236 - DNA, 1232 bp, Zea mays
cttgcatgcctgcagcgacaataccggcacgctcaccctcaacaagctcagcgtcgaccgcaccctcgttgagatcttcgccgcgggcgttacgaaggacgacgttatcttgttcgccgccagggcgtctagggtggagaaccaggacgccatcgacgccgccatggtcggtatgctgggtgacccgaaggaggccagggacggcatcgaggaggtgcacttcttcccgttcaaccccgtcgacaagcgaacggctctcacctacatcgatctggccgatgggagctggcaccgtgtcagcaagggtgcaccagaacaggtacgtagtcgtgcatggctttctcatgcatctcttcttttttttctgaattttctgttggattttcttccgagaccctgtgcatgcggatgcatgagatcagatggattttctgttggagcagccatgcattcggtgcccgagaatagacgagttttacgtttttctgttatttattttctgattttcaaaattcatttcctgagcttttttttaatgttactctcctatggcacgcagatactggctctctgcaactgtggagacgacgtgtgcaacttggttcacactgtgatagacaaatatgccgagcgtggtcttcgatctcttgcggttgcaagacaggtatggttttatgactctcagagtttgcaagacaggtatggttatatgaatacattagataatgctttatcctgctttcctacagcaagttccggagaagagcaaagagagcctcggagatccatgggaattcgttggtctgcttcctctgctggaccctccgaggtcggacagctccgacacaatcaagcgcgcgctcgacctcggtgtcaacgtcaagatgatcaccggtacgcctcgcattccgagaggtttctttcactcacgttgctatgttctgacaatggtcgcaacctgcttgcattgcaggtgaccagctcgccattgccaaggagaccgggagacggctagggatgggcaccaacatgtacccgtcgtccgctctgctcgggcagagcaaagatgaagccaccgcttcggtccccgtggacgacttgatcgagaaggccgacggctttgctggcgtcttcccaggtagggaggagggagggggtttgcattgcaatgtgcatgaactgctataacaagtgcgttcttgatgcagagcacaagtacgagatcgtcaaga

SEQ ID NO: 8237 - DNA, 1199 bp, Zea mays
aacatctacttttcctacgggatggcgtacggcggcggcggcttcgccatcagccggccgctggccgaggcgctcgcgcggatgcaggatggctgcctccgccggtacccggcgctgtacggcagcgacgaccggatccaggcgtgcatggcggagctgggcgtgccgctcaccaaacacccggggttccaccagtacgacgtgtacggcgacctcctcggcctcctcgcgtcccacccggtggcgccgatcgtgacgcttcaccacctcgacgtcgtgaagccgctgttcccggacgcgaggtcgcgcccctcggcggtgcggcggctgttcgacgggccagtgaagctggacacggcggggctgatgcagcagtccatctgctacgacagcgcgaaccgctggacggtgtccgtggcgtgggggttcacggtgctggtggcgaggggcataatgtcgcctcgggagatggagatgccggcgcgcacgttcctcaactggtaccgccgcgccgactacacagcgtacgccttcaacacgaggccgctggcgcgcagcccgtgccagaagccggcggtgtactacctatcgtcggagcaacgcgaggccttgcacggcggggagacgacagtgacgcgatacgagcggtggcgccatccgaatgagacacgacccgcgtgccggtgggacataaccgacccggacgctcatctcgatcacatcatcgtgctcaaaaagcctgaccccaggctctggtaaagggtaatctttcgtgccacatcattcctttttcttatcttgcatccataaactgcaacgcatgagcatgatgcattgtcgtttacgtttagagaggacaaacaactggccgatgcacaaacaggctagcattgctgtacatataaccaaactcttttaaagcatggaatcaacaaaactgtatcgtagaccaatatgttgcttggattagagtactatgtgcgcagccaggtactcactccgtaagaggcaagcttataagaaaaaaaacagagtttgcaatgccaagatgtaacttttataaaatctgatgctgtttataaaaagctggacctggatagtactaggcaaaggcaaccccgatgtttcatgtctaaataatcgtgtcactgatttgatgtaacatgatttgcagtctccgaggcgaaattgctgcaggc

SEQ ID NO: 8238 - DNA, 1194 bp, Zea mays
cttgcatgcctgcagtaccaacaaccaatctgggctgcacagccgacacgaacaacggatgaggggaggtggcgcacaagcaatatgaggtcatgcggtgaggttttagtgtttttactttgaagatcaacgtcttgtcaatattgacactattgcttggccttcagcaaaaaagcatcgtcacaaaatgttaacaaatcatttatattcttgcaaattagaaagtatacaaagaatctataaattaggaatgacaatacaaaaaatctcttagttgctgtctgtaccacttaaattggtatatttcgtgtggactcggatgaaaaagttcgtggggtttttatttccttaagactagtttgggaacctcatttttccaggtgatttatatttttccatgggaaaataaactaatttcccttgaaaaaatagaaatccattagaaaattgaggtttccaaactagcccttaaacaacgcataagcgtgtcaaggagagaaaaacaaagtccggtaaagccagactgattacacaagacggacctctgctgacactcaaggacctaaaaaaagtaaaagaggtcctatacacgaccagcagaggaagatcagagatgtaacaaagatctggcgttactggatagcgacccggccaggaactcctgcacttttgaagctccaccctaccacattctgcattcgtccgcaattttccttagaaaatcaggcatgcacggtcttccattctcaaagtaattctatgtttccagatttgaaaacgattatttacaaaactagttccggaaaaaactctttacaacttgtctgcacggctcagggtcaaaggttatctagtcacgtattctgtaatcagagaaaggttaaaaatgctaataatacgttgtctggagtctgcacggctcaaaccagtacggctaccgcctgcatctagtcacgtttgttttcaccattcatgtcgatgaggagcttgattgcctctcttgcttgaaggcctttttcaggaagaaggccatcgcgagctgcgccccgaggttggatcggcctcgagatagacaaacgatgcttccaaccagcagaatcccgctcgcgatcatttggcgagacttcctcccctcaagcttgcatggtgaagtcctggaagtcggtgtggaaggaacgaccgatgtgcggtcga

SEQ ID NO: 8239 - DNA, 1109 bp, Zea mays
cttgcatgcctgcagccagcatgcaggcagagtgcgtgatgagtaaagtcagctgaaatatttctctcttttacctttcaacttgctgctgggacgacagcagtacacgctgcattgtaccaccaccaccacaggctgctgctagctgctgagccagctctggtgtgtggtgtgcaacgcattacatactttggtcccccttccatggacacaataatagcaatgtactacgtaggtacacccccggccccggcctccatcgatctgcatctgatccgcgtccagcactgctagcttcctcttccttgctttcatcatgattcatgaactaccactactgctcatgtttgcaatgatatatatgagatggtacgacgatgctgctgttgctgctctgcatatatgcatcatcatgttcatatatatatgctcttcattcctgctagtaccagctggtaggccagcccccttgcattgaaagtttcatttcacagcaatggaaacaagttaataatcagcaaaggtaatccgacttctcagttgtatgtatataccagcagccgattcgtcgtctctcacccttgttggggtacgttggtgtgatgagtgagtgtctgctgatgcagcatcatcaagattctcatctcatcacatatgcatatagctgctgcgagacatcacagagcatgcatgcatcactgaagatgcgtgagagttggatgtgaatcttggtggtgctgcacctgcaagcacccactgtcgatgtttgcttgcctcatgcttaaagcattcattcatgggaatatatatatgaatgtatgcattaacaaaaaaaaagaggaaagagaggagctagctgatgatgcatggttctcgcgcgtacgtgtgtatttttctaactcgttcttactaatacaggccggactgtaccagatctttcaaagcacgagtgaaaagaaatgaaacagctagatgcaaagcatgggtatatatgatatagatgagattgagagagatggcatgggtatatacagagccactacctacatatatatatatgtatcaggaacaagggaggagggatggagacataactagatgcgcagggg

SEQ ID NO: 8240 - DNA, 1056 bp, Zea mays
gaggaaagagagatcagttttgctacgtccaatccaataattatgaagaaaagatagattggtactctggaactgctgtagtaaaaccgaaaaggactggtgtgtgatgaaactgtgatgcatacatcaacagaaagtacagatatgcactacactggtttacttccattgttgcaataagaacaagattcggtttgcttacaacatctttgaataaaaaaataaataagttgcagtacacacaagaaaaaaacatcaaatgggaaatacataccagtactcatgttctggttctggaccttaatgccacctgatgcagaaagaactacagaaaccacaaaaccaaaggtcacacatcctaaaacccatcagatttagtaaaaaaaaaatatgtgatgtctagcatcgtaaaaaaaaagagacgatgagtaccagatatagcgggcgtaaggattccatctccaattgctgtacaagtaccaattaaaacaagaataagaagaatgtttctcttatatgcatgtgactctatccatctctttattttcgctgcaactgaattctcttcataggtttgccgactatacgtcgtcaattcctcgtcggtcctgtgttgattaggtatggtgttgatctttgcgtgacggcataatagggaataaagagcaaatgtaccacctgccagaaagtgcaacatgttgccaccttagaagtcacgtattatgcaaacactgagaagcagcaaaaatttatctcaggtcaaaagtttaatcattattaaaaaaatgctcttcagcaccctgacatctctcaagaaaggaaaagtattcttattacaaattcaagaggtgtgatatgtcaaaagtgtgatgtgctatcatacttcccaagtacagtaaaatctctatttttctattgtatacaaatttagttatttgagaagtattgctggtggtaattcaccttctaaggcatgcagacccttaaggggttggtaagacatttcgtttaaataaaaacatggttgcacattgctgtctgtctgcaggcatgcaa

SEQ ID NO: 8241 - DNA, 1201 bp, Zea mays
caattcaccattcataatgaaatactgcctatggctttcatactagatgcctctattacaattcagtatctttatagtcatggtattctcatctatagtggcgaatgctatgatacattgtaaatggggaagatacataacagaagtaagcatacaacggtattctcatccactgtattttttacacattcaagtaaatcacttccctcaagacaaaaattagagacttaagaaaaagaattgaaggacaagtcacagcgaacctttctcaagacagatacattcttctgctgaagctcaaggcctaataactttattgatttctccatcagcaccttcctttccctaagaacctcaaaggcagcaggtaaatcattgcaagacatttccagcctgtcacgtaaatacttcctcataagaaaaatgatctacaaaagatatacatgctaaagtaagcattactgaccaatgctcgcgcagtctcctctgttcatcctctaataaagctccataaggtttcacatgagatttatcaaggccgccaattacacgtgaaacatgcttggtctgaataccatccccagattgcttcagtctctttatatggttgagctgtgttctactaacctgaaaaggttacaaaagcaaaggtaccacagcattcagtaaggtagtgtttggttccggagtttatttggatggagcggctctattccagattctaaggatagaacgagtttgttctgtgtttggcagtcagaacagagtcgctctgttttttgtttggttccaagatgaagtaaaacggaacggctccatcctgtgtttggttttagagttcaacaaaactgaactttctattttaagagttttgtgtgaatttctatgaaatgtcaaaaatgtcaaacatccagctgatttctgaaaaaaaagaaaaggattaaagtgcactatttatcactgttcatcagagccttgtctcttgcccatatgcctttcgtcattgccgcacaccgagcagggaacaacctttcttcattgtggcacaccgagcaaggaacagccagcgctcggcccagactcagccagcggctacgccggtaatggcggacagcagcgctatggcaggggtggcgctccacccggaggaggagggcaacggaagctgctctgctccacgcggcagaggcactggttgggc

SEQ ID NO: 8242 - DNA, 1078 bp, Zea mays
tgcccgccgcgtgcaaggtcaagacgccgcccgtcagcaagtgccacggtacgctctcgtcgcttttgccttttgtgatggcgcgcggtgggagcgagcgatcgtttgactgacgagtgagtgacctcgcccttaaaaaatgcagtttctgttcctggtgtgcccagcgcgtctcctggtatgtaaattgcgcgtgtcttttgcgtcttaaaagagtgatgacaaacaagctttcacgatgtttcagttccggctccctcgtccggggccccagacttcgggcagtcgccgacgccgtcgccgtcaaccccttcgggatcaccggcagcaacccggagccagaccagcggcgctccagcgccttccccagcgcgttccgccgctgccggcctctcggcaccaccacgggccttcaccttcatcgctgccgcgactctgttggtgtaccgggtcttgtgagctgggctcactcacccgagttcatgcgctccgcccgtaccttaccccagtctgaccacaaatcatgtaccgagagatgtatcttgtgagcgtttccgtttcgtttagtagcactgcggctgttcatggatttcactgcctcgcataaataatgctaccggccggccacgaatagcttaccccgctgccgctgagtaagtacatcacgatgttcattcgaagggctcgcagcttacttatacaaccttatagtatgtatcaagtgtacacaatacacgtttcgcaatgcgcctgagcgcgtaggccagggatgtgcgaaatgctcacgcctcacgggcattttgccagcgagtgcagctgttgcaagaagagaaaaaagaaaagaaaagaaaaaaaagaagtgcgctcaactttgctagttcgtttctagtttattaaacttcagatttccgaacaatcgatacaacaaccgttacatcatccagcttgccgccggagtagcccaggtacccagccgcgagagcggagtccgagaacgggctctttccaaacccacaccgccccacatctttcgatcgggcaaccagtaaatcggcgatttcctgcaggcagcaagatg

SEQ ID NO: 8243 - DNA, 1180 bp, Zea mays
ttgcatgcctgcaggaaatgggaggaggacaagacggaggctgccaatggagatagggggaggtgagcaggcagagccctggggtcctccttggggcgtggacgcgtggttgtaggaagaatatgatggttggatgaaaagggcaaaaggtaaaagaaaggagagcccctggatggaatattctaataagatccaatgtcccaaaatttgagtatgggtagacaggtggtagagatcaacacatagatatccactaggtgcaccctagaaaagcttgtcaccaaggtcatcatgtgaattcttcacattggtgctttgttcactagtatgagtttttttttgctttaaaaaatccttttttatatatttctctttgcgttattgacttaccgtatgtctgccagttttggtgcattgcaagatactgtttttttctcttatcaaatgttcatttgttcttcatacaattattcttggttcaggtgtgaagggttctctacttatccaaggacatatgaccttatacattctaatggcatcttcagcttgtaccaaaacaagtaagcatgtggcatctgtaaatttgcagtgggacaagtttgtgaataaaataaaacttcctaactaatatttgtgttcttgaacagatgtcagtttgaagatatactcctggaaatggacagaatcttacgcccggagggtgcagtcataattcgtgacaaggttgatgttcttgtaaaagtggagaaaatagccaatgccatgaggtggaagacaagattggctgatcatgagggtggccctcttgtacctgagaagatactcttcgcggtcaagcaatactggaccgttgcaaaaacaagcagctaacattattcgtattttatttttttctccagtcacaggtaacttggtccctggatgtgtttattggggggaaaatctgccggtttgaaaatcatcatcccatgtttgttactgaaaatagaaaacaagcttacaatcaccctggaggatggtaagttatgcgggacctagttgtgaacttgtggtttgcttattccactgttgcagagatgcagaagacatgccaaaaggatcaattgaccttgcactagtgactcatatctgatcggacagatgcagctgcttataattggaaccctgcaggcaaagcaag

SEQ ID NO: 8244 - DNA, 1159 bp, Zea mays
agatttaccaagtacacacaggcatgggggctcagtatttcaaattgaagtacaaaacaaaactccctctctttattgtttacatggagaaaaaagaaccatcagtttgatatgtaaataaagatcagaaattcagaatgaagccaactttcgtcatcaaaattcaaaaactatcagagcaatggcaaacaaaaatgcaaactcctggtttcaattgcaacaagtgtaaggggttagaattgtgccaataacatagttgtcactaacagacccaactgcaacaccttgtgtagcgcttatatacaagtttatgtgagctgggagaatttaataggaagagaaggcacaacactaaaaacatacctagagaatgtagatagtgtgtatctaaggtatgtttatttgtcttacttctcgaggaattttaacaaataaattagctgtgtgtacacatttctttcatgactacggatatggatggcatatataactacacaatatgtataggataaaatattatttcaggcaatttatggatacttcatcaaaggtagaaatacaacagtaaccttagcaacagcatagacaccaaaaagaccagtgtccttgtaattcatgttgaatgacattacactctcagcaatgtcattgattgctgctttctgtacaagctccgaactgtaaacagtaaagcagggtaacatagcaaagatatggtcagtaacagactatggaaaaatgaggatcaggcctgtacacatgatagcgaaaacaaagaacaagaaaaaaagagtgaacttaccccatatgctttcctccaccagcactcttgttccatgaaccaagcattgattgcataaccatcagtgcaacagaatcaggatctacccatgatgctccattgaaagcaacagcaaattgagcaaggggcatgtcatcgtcaatgattcgaacctaccaagagagcatacaatggtgaaataatgtgggttcatgaaaaatagcacaactaagtatagagtgaaaaattgcagaacccacctcagaacccgtgaaagaggctggttgcttagcgaccaacatgtttgttgttgtagggtcagttgatagcttattgaacaacttctttgcctgctcaacaatgtcttcatgtttcaca

SEQ ID NO: 8245 - DNA, 1132 bp, Zea mays
tcttgcatgcctgcaggggtgcgacgactggcaggggctgctggatccggcggcggcggcgcacccggtgctgcgcgccgaggtggcgcgctacggcgagctggtgcacgcgtgctacaaggccttcgacctggacccggcgtcgcgccggcacctcagctgcaagtacggccgcgagcggatgctggaggaggtgggcatggccggcgccgggtacgagatcacgcgctacgtctacgcggcgtccgacgtggcggtgcccaccatggagccgtccaccagcgggcgcggccgctggatcggctacgtggccgtgtccacggacgagatgacggggcggctgggcaggcgcgacgtcctggtctcgttccgcggcacggtgacgcccgccgagtggatggccaacctcatgagctcgctggagccggcgcgcctggacccctgcgacccgcgcccggacgtcaaggtggagtcgggcttcctcagcctctacacctccgtcgacaagacgtgccgcttcggcggcgcggggagctgccgggagcagctcctgcgcgaggtgtcgcgcctcgtcggctcgtgcgccaaggacaggcccgcagcaggcgaggacgtcagcgtcaccctggcggggcacagcatggggagcgcgctggcgctgctcttcgcgtacgacctcgtggagctgggcctcaaccgcggcgcgcccgtcaccgtcttctccttcggcgggccccgcgtcgggaacgccgccttcaaggcccgctgcgacgagctgggcgtcaaggcgctgcgcgtggccaacgtccacgaccccatcaccaagctcccgggcatcttcctcaacgaggccaccgcgcgggtgcaggcgctccgaccgtggcgcgactcctgctacacccacgtcggcgtggagctgcccctggacttcttcaggatgggcgacctggccagcgtccacgacctgggcacgtacgtcgcattgctcaagagcggcggcggcagcgacaagccagccgcggccagtcgacgcggcgacggcggcgtgctggcgaaggtggtggagttcgtggggcggcaacgcgcgggcgccttgccatggcaggacgccgccctgcaggcatgcaagctg

SEQ ID NO: 8246 - DNA, 1186 bp, Zea mays
gcacggttcatgacattatcgcacgagcagcggaagatttcgcagtccgtgctgtgtgtgctatctagacgtgcggctcttatatttggcggccgcggacgataaaaaaaggctggcgctgcatgccgggaacgttgccgttttccaagcttggcgtgggggcaagccgagaaaccaaccaccgcctgccacccacgaggccacgaccacgagcagcaaccgccgcctgccagcagttctgcttcctcttccttccctctctctgccccagaggccagacacagcgtccccgaaatctagccagccaccgcccaccgcctccctcctcctccgcctccgcctctctctctctctctctctctgcgccaagaaagagaaggcgccacgttgacattgcggatgccgtagcgggggcgcgcgcgccagccatgcgctcgtgatgatccggccgttccagaagatcggccacggtctcgaaaaggttctcgtccaggcgccggaggtcgtcgtcgccgccgtcgttggcctcggacggcacgggcgcctgcctcctcgatggacgcgcaggcgcagcctttcaccaggcgggcgctgtccaggagctgcgggtccaaggggagccggctgtccgttgaccatccgccgccgccgctggccggcggcccttcggcggacaagggggtggcagggagctcgtcctcgctcgcggtgccgcccgagccggcccgtcgtgagggcccgccctcaggtgacggttcttcttggaccctctaacgcccgctcctgctactgcaaatatgcgcggatcttgttggtgttggggaaatgattcgcgttggttggttgcactttgcagacgcggagaaggtgagggagaagttctccaagctactgctgggggaggacatgtccggcaccggcaaaggggtgacctctgctctcgccctttccaacgccatcactaatcttgcaggtaacaaaaatttttctttctccgcccaccaagaatcatttctttcctttccttttctaaataccatttatttccttccgcggttccacaatctgagccaatctgcccgatttgtagtggaaaccctgatcaactgcgcgttcttccttcctcatgatgccatatttttcagcttctgtgtttggtgagcagcgccgtctgcaggcatgcaag

SEQ ID NO: 8247 - DNA, 1124 bp, Zea mays
cttgcatgcctgcagctgataatggagatcctatgaaaaagcgcagggttgagcgctcccgcaagtatgtgatgctccccccttcttaaaaaaatggtccacattaattgataattaccatacagtatgtgatgttccattacgttcttatggttcagaatggcagaagcgaaggaaagaagctctacaccagtaataccgtccgacatgcaggccgttcttaagcgctgcgaaaccctagagaaggaggttcggtcgctaaagcttaatctgtccttcatgaacaggtgggtacactgctgcaagcaaggacacgagtttctaaggaaaatccttgtggagcgatcacaaacctccctttgtaaacctgtttgttaaaatgtttatacacacggttggttgcaggaaagattcagagcagaccaagcagatcgaggagcttcaacagaagaacgaggacttggccgaagagaaggagcggttgctggaagagatcgagagaattgtctccgaccccaacacttgagcacccaatctcctttttttttgggtaacttatttttgtgtactaatagagttaggcttgaaatggtccttgatacaaatacgtacagtccagcagggcagcaagaattaagtgctggcctaaatgtatcaccattctttccttgttatcacaagtttaatgtatattaataccaacaagcaaagggatcagggattacagtttacttcctttgacttgtatcttgaactaattacagtatgaaatggagcccaaaaagggtggtagcatcttggcctcttgggtattagaacatgaactacattatggttgacccaagtttcagtatacaaagacagcaccacatataacaaagagcaggaacaactttcatttcaaggttgtttcagagatagaaacaaccacatttcatcatgaccccagtattgtatggtatgtatgtgcttgaagccatagttgtgtcactgtagcaaactagcacctcagacatgagagcgtcttcccaagctggccaagcatgagtttcaggtaaggtggagtgaggaagattagaggggattttcttatatttaattttgaatataaaacaatttaatct

SEQ ID NO: 8248 - DNA, 1091 bp, Zea mays
cttgcatgcctgcagtagatggatcttctggtcagtgcttaaaaatggaatagtatatatatacatatatgcgcaaaaatatacctcctaagagacacgagataatcctccttggatatcatctgcatctcttcaaggtctcttgcatagtcagatacctaaacaagcaaacatataatgaacataagtctgaaaaatataacacagctctaactgactactgtgataaagcatggaacagagatagcataatactctacattggaactcacgtacagttatcacttcaagcaattctatatgttgatacatttgttttgtcacactaaacagaagatattgttgtttctattgtacttatcagtccaccgacttgaatcttccaaaaaaaagagaaaacattgtactcaagtacaactgtgcaattatgatatgcagacatccatttccaaacatcactagaaaaaacaatacaatttatgaatagaagtacatgttgggaagtgtaacttcttgcccatcatttcataatgtgaatacaaaggagtacagcaggtacttgtgcaagcatgatatatcagcaccactgtcaaattcaaaataaaggacaaaaagaaggcaacaaccatgttgtagacacatcttaaatctggttacagtctcaaaacctccaatttggaaaagaaaaccatgttgctcaatagcttttgtcaagatttctttgcatataagaccaatgggtcaatgttagaaacaaagagaagaatttcttttaccaaaaatatgatacccacaagatgcttccttaattaaacaatttctattagcggaaagctgatcttaaaatcttattgatcaatgttagaaataaataagggtcgttttacaaaaaaaaaagtttccacaagatgcttcctgaatgaaacaatttctattaacagaaggctgatcttcacgtcaagtgcgagaacttttacagcaatttaaaacacgagtcacaagcatcaccacacaagtaaaaatgactcactgggaaatttatttgtgttccagctccccagtattttaatgcagcaaggtcataggccctt

SEQ ID NO: 8249 - DNA, 1136 bp, Zea mays
ccctcctgcacagcagtacagatcccaaactctagcgagctcctaaggacgaagaggccggtggctgccagcagtacagattcaggagctgggttgctggaatccggtagagtagaggacgtccatgtcagcgtcggtggtgtgcccgtgtggggacgccgttagtcgaggcggaggagcatacggcctttatttggtgcgagaacgctgacgaaattacaagaggcttgcattggggcaggccgccgcttgcctccgcgcgcgggcggcgcagccagccatcgaccatttgcgcgcgtgtggccaaaggaactgctgggtgttcgcgcggaggacaggctcaaggtggaggtcgttctagaactgcggggaacaaagcttggatcattttattcttgaagtgtagctttacaaaatcctgttggaatcttattccaggtacacctccgtcaacaagacgacatgagagaacaatgtcaaacatcaagcagctgctgcaagtggaagtgaccattctgatgacatggagcatatggaaatatagaaacaaatggctcttttgacacacccccaactatagaagggtgcaagtcaatcttcagaaacgagttataaatagagcaagagccaaatatgaatatgccatcttgcagcggcttcaacagctatcacctaagagcatctccaagagactagttaaataatttgtcaagctaaattttagctacttaataacaaaatagttctccaacagactagccatttaacttgccaaattatccggctctctaaattgactcccttactagccaaatttagctaacaaccctagctagtcaatctaaattgcaggttggagaatctgttggaatgagatgttatatatagagtttaatctttatggagagacaaatacagagttaaatagagagtcaaaagtaaagagtctcttggagatgctctaagcccagaattccctgttctcatgttttgcttttcctttgtcttttgtaaatctctgtaaaatatgctttcccctttttcgataataaaataaaggttaataaaaccctcatgtattcttttttaaaaaaagaccaacagatggcccagtatggtcactgcaggcatgcaag

SEQ ID NO: 8250 - DNA, 593 bp, Zea mays
tcttgcatgcctgcagttacaggagtactccaaaagcacagaacgagcacagcataaattatgacctatttgatgaacaagattagtattaataaggtatagcacatggcaaaacaagaaaaccagacatagaaggtagttcacataggagcaccttagtaaccaacaaaaattttgtgtatttgtcgtataaggattgcttccctttaaggtcatgttcctgcactgtaaagcaggcaaaggaaaaaaaagttatgaaggttaaaatgcatcatgggagcatcacctcattttgtacaaataacaaagaagctaaattttgctcccgaacaaacaacagcaatgctacggaatgcaactacctagcatttccaaaaatacagggccttccggtactgtattacaacttacaagcgatgagggcatgaggccaagacgattagacgaatagctacagaacaagacaatgagagttcagcactcactttttgccagttccttctccttggcagcagccaggcgcttgagtttagcagcttgtgcaaatgtggacggcctacagcagacatacaggcaaagaagcgaggagtatt

SEQ ID NO: 8251 - DNA, 1169 bp, Zea mays
gtgcctgcagattcacattagcagaacttgatacagttagaagggacttggaataaaacagcacattattggcgcaaaagggaatcagaataaagtaaaatcataattagcttgacaaagcggaaattattatttgaaaagtcaagagtagggtcctttgcttcacaatttgaccttggcaaatgtgaacttctttcagcacaagtggcccttttttcccccaagtccctgaatcttactgtgtggtaccatctttctgccatcccacttttttatactaacacagcatcaatttgggtagcatatcttacatgaactgttatccttcctctatgacgagcagttcagtttaagacctctacctatatccctcaaaaaaatgagtagttccatgtattgtagcatgggttgaccaatagttagattttgctacacatgaaaattgtcagtatacatgactactaaagagatctgtcttctttgatgatctcttcctgttctcccagtcaaagaatcaaagaccctccaagatgaactgtatctccaccacaacttcagattaaacagagagataactcgaggcgattgtgttcgacagttcacaccatgggattaaaacttccagtaaccaaattcttcagttacaagacatctgatttgaccaccttttcctatgagaaactccaaatacaacaaatccagtcttgcaaacttgtcacagataagaagcagtcactgaaacaagacggagagtcggagacataacacatctcacaaattgtatgattgtaccaggaaactttgagatggaccctgattcatttgactaacaacttcaatcgacgaacagaacagggctacctataaagctacaaagacaaatctagacaacaaatacaaaatcaatagaagggcgatgattggatcctcacatttatgatgttctttcgccatggacagctccagcccggagaccgcagagaacactgcaacagcagagcagcatgtcagaatcggaacggaactacacagcacaccaacacagcccaaacaaatcaggcaaggcgatagcggactcaccggagatggccggcgtgagcacgccgtcgccgatcaccatgcaggtgcccaccagcgccagcacgagcagaacccgctgcaggcatgca

SEQ ID NO: 8252 - DNA, 1108 bp, Zea mays
gggagataaacataccactgttgcggcccataagcttcacgacaccgatgccgttctccgcactttcagcctcgacatgagcagcattgatggccctctgggcctcctccacagcagtgtcaaatccaaacgacttgtcaatcacctgcataagcagttcaggatgaagctacaatcaggaatggacaataattagctatttttttttcaaatacgcaggaggagcagatcgtaccgcgatgtcgttatcaatagtctttgggacaccgacaacagagcacttgagaccccgtctccggacttcctgaaaccatgtttcagaaattttgagtcacacatcgtttccgcatctaacaacaattcccagaaccgtctggatgcatgtgttacctcataaattacagaagcgcctttctgagtgccatcgcctccgataatatagacctggttaatgccacggtcctgaagacaatcaacgattttggcagtgtcatgccctcctcttgaggttccgaggacagtcccgcctctcttatggatgtcgttcaccgactttggtgtcaacgcaacagtgtttttagaatagaaacccttgtatccaccctacacattacacacacataattagtccagaaatgaaacaaggccggctcgaaatgttttataagtatcatcctcacaacattagacaacataatgtggcaaggtggcaacatgataagtctatcattgttttgctatcaataattgtaatcttgaccaatccaattaattaaataagcagttgagaaatggttcaaatgttgtgatctcggattattctttgttttaaaaaaaacatgttcaaattaactagtaaacaatgttttttcacaggacgaacaccattaaactcctcggtcctcacctctatgccgacgacgctggagacgccatacatatcatacaagccgcaaacaagctcgcggatgaccgtgttcaatcccgggcagaggcctccacaggtgacaatggcggcgttcacctcatcggactggaagtacacccgctgccgtggcccggcacgccggaagtgggtgcccctggcactggtcttatgaacaacaat

SEQ ID NO: 8253 - DNA, 1158 bp, Zea mays
gcccccggattttcgttagtcgacctgcagcgtccgccactcgttgagcaggcggtcgaccacgtcccccgtgggcaggttgctgaggttccagtcggtgaggcacatctggtagcacccgctggggtgcagcgccgtccacagcatgactccggtgacggccgggtgcgagtatgcctcccgcagcacctgctccaggtaggcggcctgcgtctgcgcgtcgaacttgttgctgatgtcgatctcggtgaaccagatgggcagccccagggtggcgagcttgtcgagtatggccctcatgagcgggatgttgggcttggagaagtgtccctccaggccgatcccttccaggatggcgccggcggagcggaggtccttgagcttggacacgtacgtgtcgacggtggagaaggggtcgtcgcaggtctcgatgacgttgtactcgttcatgaagagcgtggccagcgggtcggcgtcctgcgcgacgctgaagaactccgcggacgcgttgggccccagccgctgctcgtagaagttgtagtgcagcatctcgttgttcacgtcccagtgcgcgaactcgccgcggtagcgggtcatgaggctctggatgcgcgtgttgacggcggcgcggaggtcgtccgccgtcaggttcttcacccaccggggcgtcgcgtcctggttctcccagaagatgttgtggccgcgcaccatcacccggtgcgaccgcacgaacgccagcatctggtccggcacgtcgaagcgcagctgacccgacatgggctccgtcgagtaccacttgagctcgtcctcgaacaccgccgcgttgaaccggtccacgaaccactgctggtacgcctggttcccaaggatggtggacgcgatcgccgaaccgatcgggaagtccttggccgtctgctgcaccgacacggacgcgcccaccacgcgggcgccctgcgggtcggccacgtggatggtcgccacgcgcttcctcctctgctcgatcgatcgggtatacatatataaacaagagatgaagaagattagtactgtactgtactactttagtcgcatcgtcgaacgcgttcctcttctccggcctcgttcgttaccttccggatggtatcctgctggtgcatcgcccactggtccgtggtgaac

SEQ ID NO: 8254 - DNA, 1172 bp, Zea mays
cttgcatgcctgcaggaacatgacggcggcggcgggcacgcgccggtctccccgccggatcggtgcttgcacatcagcgaggtgcagtgcgccgcggacgggtccgtgcgcgcatacgcgtcgttctccaacgacacggagatggggaggcacctgccgccacgcccaccattcatggtcaaagatgaggcggtcgtcgccgaagggcactgggattcagctcggagcatgctctgcctcagggcgtgccgtgtggtggtgggctcaggggagtccatggcggtggacgaggagtgcgacatgggcatgggtttctggttcccgggagtctggacgattcgggaccggagtgccgtcgccggcatgctctggaactcgagcaaagcgggtgatggctctggtgtcagtggtgttgtatcagcgtcgagcgtcgatggcagcatccatagaggcaacatctctgaagtgaagtacgagtacaactacacgatggtggaggaggcgaaaaagcattgtctccaggatcccgcatcgagcaagcccaagaagaaggttaaggggtcgttcgtcgctcctaataactacaccgatcatgacctcgagttccatttctacgacactaaaggcagcatggtgggtagtgggatcgcctacccggttgctatcggcccggcgatggtctatggtgatcagctggccgccgacgattccttctcacggaaggccgtggtcgacatgaatacggaggagctgttgaacgtcagctacgacatacgtgagcatgttccacctgcgggctgggtgactcccaagaacgggtcgtacatgatcatccttgaagaacggagaatggcagcagagggtgtctttgatccgaagacgggcatcctgtccatgatcgcctgccgagagtacaacagctcgacgacggactgccagatactgatcaccgtttatctagcctcgctgatggacgggaaggcgcaaggccatggaaggggagcgatcagcagcctgagaaacaagacggcggcggaccctctcttcttcgagaaggtcgacatcatgttgtccgggatgtactccgagcagatctcggagtcgatctcgaggatggacttcgagagcatcctgctggtggtctcgacgacgctgccgtgcgtcttcaccgt

SEQ ID NO: 8255 - DNA, 709 bp, Zea mays
catctctgaacaacagggacaggtatgcgttgccctatgatagatatcaaacaattaattgtgcgtttccttgcaacttcacgattcgagatccgaatgctgatgatgaacagcgggtgactcgtgcagatggaggaggatccagagaaatacaagcgtctgaccactaaagagctgctgatgcagaacatcgactacgcgctcgatatctacctgatatacgtcctaacgctgtcgatcttcccaggatttttgtctgaagacaccggagcacacagcctgggaacatggtgaagtttcttgcttcgatgcactccgcaaatcacttgcatcattcagacatgacatccaacctgttgatgttcttttcgtgaaccactagaaatgcttgctagtatttattcctggcaaatcgtctatgtgtttcaggtacgcgcttgtgctgatcgcgatgtacaacgtgtgggacctgatcgggaggtacgtgccgcttatcccgtgcttgaaactgacctcccggaagggcacgctggcggctgtcttggcgcggttcctgttcatcccggccttctacttcacggccaaatacggcgaccaggggtacatgatcttcctaacctccttcctggggctcaccaacgggtacctcaccgtgtgtgtgctcatggaggcgcccaaagggtacaagggccccgagcagaacgctctg

SEQ ID NO: 8256 - DNA, 1069 bp, Zea mays
ggtggggggttgtaaggcagccccgacattgtagaaaaccccagaaccactgccccacacatacacagcggcacggtagcccatgtgagaacgaacgaccgcggctaaaaacaaagatatctaatagttacaaaaatatcaatttaactgttctgacatgttgaaataacagataaggaccatatatcagtcacttcacacattaacaaaattagaccctttatttaaagtggagttttcaagatgaaaggaatatatatcaaacaaatgtgaatgacaacatgcggcccttgtacaactaaagaagttacacaacctttactaccgcatcaaactgaggaaaaattagggagcataaagtggcaagcaaacatacatcttggaaagccttagaatggatgctgcaagcatcagcattcatcactggaggggcaggggcagcagcagcagcttctgaggcaacagtctcatgctgaatggtccggggacctaatacagcatcaacagccctgtgtgccatggcactacccgtgccaaacgccatacctgaaagaatatgttcattcaattcaaggattatgataatgtttatagctgaagctatccagaaaaggacaaactttgaataccaccttgagcaatggtggacccaattcctccaaacatggagccaccaccatctcgaacaggagctggaggaggagcctggcgtgctgccaaaaggaaaaaaaaacagatgacacattagttacagaaataaagcaaattataactccaatataagcataatggactgtaatcctaatacgaactgaaatctaattgattctgattcgaaaacaaggaactgtaattattattatcatctctgtttccaacgtaatcaacaatgtttaagaacagcttcatactagcaccccaacttccaataagtatataacttacggtatatttaggtcatcaacattgctatagtaacaaattgaacacattttgaacaactgaacagacacagatatacaaaaaacataactgaagttacataatcataacacatccacaatataat

SEQ ID NO: 8257 - DNA, 1167 bp, Zea mays
tagagtcgactctgcagggataccaccaggtcctgtcgacagtgtcagagctgagacgcggccatggccatgcactcttgttgttttctattctatgtttttccctgaaaatatagtttttgagttggaatttaatggatatgtgcgaaatcattgagctaccgaatcattggagtatgattgatggattcgcggagagccacagccctggtcaagtatctcaagccaaattgttctgaattttcatgaaaacgaatttgtccgaaattcgctccaagaacaaccaaccgtacgtattattttccttggacactcaagtgagagtgaaatgagtttattttcagctcattaagctaagataaacaagcacgtgacaaagatttttttttaccaccatgcttcttgcgaggaagataggtaccaattacggttggactaatctaaggtacaaccattaccccagtccgaagttatcccagacccagagatgtgcctcaccctcacgggagtcgggacactgaactcattaccaacttgtaggctgcccagcggtggataccatgccaaccgtactgtcaagatgtgggccgtttcctttgcgatttctcgtggccatctcatctgacctcacattcaattgttcttccctttcagctgggcaagtggagcacttgatcctgaaggtactgccgctcacagtagcgtgacatcaatcaagaggtatgtctgcatcatctcaggatttaattatgaccttgtttaggcggcactgaactttcaaaattagaaagaaagaaaataagaaacaggccacttttcatgtgtttcaaacggaaaagataaccaggccactattccgttcaatgctgccttttggactcgagctgttttaccttcatagcattgcgaaatgattggagtgagtgagcgatgctgactcttcttcttaccgaaactttccaggggtgtctgggctatgattgcagtcttccttgcctactgcacgcttcaggcaccttcaacgtgagcaaattttcttctttttgtccctagtagatagcctctcatggttgtctgcttgtatttttcttctatatcaataaaaacatgcattgtcagttaccattcttttttttaaaaaaaatgcaactcaaacattggagctgt

SEQ ID NO: 8258 - DNA, 1102 bp, Zea mays
ccttccaccactctaagacggatgtgaggccaggctgtggggccagggcatgtaacccaaatttccttaggagcatataccagaaaattttgtgaaaatgcaggaaataaggaggtggttcatggtttcatcttcctggtcacaaagaggacacctgtgcgggtgattcaggccctttttggccagacgatcagcagtccagcatctgttgtgtgccaccaaccaaacgaaaaaacgacactttgagggggcccaagatctccagattcttttgtactgatcaaaagtagcagatcctaagaacaagcctttataagctgcttttgctgtgtatttaccatctgaagcaaggctgaaaacatgtttatcccttatgtttggttgtaactcaatctctgtgagggattcccaaagctttagataatcaaccaagactcttactgtaagagcccccctaatatctgaaatccatttcctgtttaaaagtgcttctttcaccgtccttctgttagcaattcttcttggaattgagttgtgcaggctgggggcaatgtcagagattctagtgccatgcagccatctatcatcccagaacaaggtgtttgatccatccccaacctcagaaatcagggccatagagaaaaaagctctagctttgtttgggacctgtatgggaaggcttgcccaaggtcgccccaaatctgttttctgcaaccacaaccatctcatgcggagagcccaacaaagctctgggagactagagattcccaagcctcccagctgaaggggtcgacacacttttccccaggccaccaaacaatgtcctccccttgcttcctttctgcctctccaaagaaaaccttttcttatcttatcaatggcatctaaggcccattggggaatgtcaattgccatcgctaaataaatcatcatgcctgtgagaacatgttgcacctgaattctccttcctgctctggtcatcaagtcagctttccaattagggagttgatctgcaattctttctacaaagggctggaactgctgcctagaaagcttatgcaaggatagggggagccccaaatacctgcaggcatgcaaaatg

SEQ ID NO: 8259 - DNA, 1086 bp, Zea mays
caaaaacatatcagtctattagatggtgataacaatcttgagcagcaacagaagggataagatggcaatctgtttcggtatcaaatttccattagcttgtgaggtaacaaccagaattcaggatatctgagattagcatatagttgttctaacgacaaacatccacagcagatgaacataaagccatccaaagaacaaagttgatttccactacttccggatgatgtgggacagtgcggcgggagggggaaaaaaggtgatcaaataaaacaagcatgcataatttcaggttctcatgacaaacaaaatagaaaggaaacagggaatgatcaaattctggttccatttccgcagtatctaccaacaatggaagagagaatctgttgctgaccttgcaaactgagaacaaagccccaatgaatgcccggattccagactcaagagcacgccaagatcaaaacttgagcagattcgcgcgctccaagcatcagtgcaggcagccggcgacgaatccccgaccctccgaaagcattccaaggatttgttttttgctatggcgtcgtcgacctcctcctattcacagccgcggggagattcgaccaggaagaagagacgccgctgccctccgggtgcacggaggggaggaggagcggaccctcgcacacggaccacacgcggagaggcgctgcctagccttgccctgcctgctgaccccacggcgaagaggatggggactgatgcgatcggtttttctaggagaaataattggcaaatctcttgtcggattgcagagctggtggagtggacggggatttggttgcatctcgttgcgatccgtttgcactcaataatagaggagcatcagcaataatataatgctaatgacaggtgcactcaaaagtcaaatcaaataataaacaagtttattaatcactgatgtgatgccggtatcggttggcgtggcgtcaggctaaacatggcagaaggagcttctgtcatgtgaatgaatacatataaaactccagatgcatgtgctatgattagcaataaacaagaattagctggagtgactgtaattaggtgtgc

SEQ ID NO: 8260 - DNA, 1127 bp, Zea mays
agcttcggcgagaccaccttccggaccatctcgggggcctccgtcagcgcgaacgcgtcctccgccaggacgggcaccctcaccgtctcccttataggtgacgtgcaggagcccgccgccgcgttcgagagcaccgcctccttcgccgccgtgcccttgcagccggtgccgcgggggtcgggcccgctcaacaccttcttgtcggggccgctggagagagggttcgcctccggcccgctggacaaaggctccggcttcatgtctgggccattggacaagggagccttcatgtcaggccccatcgatgctggcagcagaagcaacttctcagcacctctttcctatggacggaggaagcctcgtctgaggcttcttgtacataggattagtagacccatgaaaaccgcactgtccagaacattcagcaggagctcacaaaatccaggctgggttcaaaagtttctgtcgcatcctatgtctcaactgccctgggcaagggacgcaaagtccagatcagaaggttcacaggatggattggaatctgggatacccgagcctgagtataacgtgacaaggaaccttcagtgggcacatggaaaggcaggggaagatagggttcatgttgttctatccgaagagcaaggatggttgttcattggaatttatgatggatttagtggccctgatgtgcctgactttttaatgagcaatctatacaaggccattgatagagaactggaaggattgctctgggtttatgaagacagctctgaaaggagtgatcatgtatcgactcatgaagagggtggattggttgctgcttctgtggatgctcctcatgatgatagtggccagtgccagagtgacagtgggagacaagaacttggtaattttggaaaacaaaatgtatcacctggaaagggttgtgatgatagtgccttgcaatttcagccaaactgtaccagcagtgaagagaaagatttggctccacatggttcaagtagtgagatgttgggcagggatgagatagttgaggaaatggttgaagctgatctgggaaatgatctccaaagtagagaaccccacaggctcgaacagagatctttcaggtacagatctaaacacca

SEQ ID NO: 8261 - DNA, 1097 bp, Zea mays
aacagatgtgatgtcagattgtttggaataaccagataaacatctatcgggttgactgattcatatcctttcagtgttgctgagaactaactgaatgaaagtaggcagacttctgaattaattgcaattttgggaagtgtaacatacaaaaattatcttgtgtccgaggaaatggattgattgattcagaaaaccaaccaccctggttgtgcaaaccaaaaaaagaacaatatagagcagtaaaggttgattataaccagcattccagcaatgaagccaacagtaccattacaaaagcaatgaagtcaacatgagacatacctgaaggataaggcacgtatgtcaaatcacttgcagcccactgaatatggaatcattagtgatagaaactgatattcaaattctattgcatagagggtggttacatatatagacccaggggaaccctaaccctaatgggctagcagcccatttacacatacatggataatataggagcatacactctaacaatcagtctggtggagaagctggaaatacacagtacaaaagtagcagaaatagagaaagtacttaaaaatgagaatataaaaggtcaaatagtttagagttgccatacttatacttgtgaagaatatgttcctagtcaggaaagcaatttacggttgccaacgctagtgaaaaatatgaaagatatgaatcaagtacagtactatttgacgaccaaatataaccttgatgaatgtctcccaacaaccagccaactaggataaggatttttaatgtcaacccactgaaaactaaagattcattagcattctacaaagcagatgttacaatctaaaatatgttcaatcagcagggaaatggtgataaaacctcaaagctaatttaaaacagtttgctgcctataaactgctggttctcactaacacatacatgtacagttaaatcactccagtcaacccacttattcagaagaatagactgctatggagctgtgagctatatacgagagagatcgccatttatatttgatcaagtatctggctttctctttgaaagggggctaaatgcagctgcaggcatgcaagatg

SEQ ID NO: 8262 - DNA, 1089 bp, Zea mays
agcggatctgatcaagaaacctacagggatgtcgcgacatacacacacacacactcacacacactcacacatgcaatctgattctctctcagttcctcaagaacaagaggagtttttacacaagtacacagggtctgttacacaccgatgtgacccttgcaggtgcagagtgaaataccacccacttgcacaagtgaaaaagggaaacatctctccctctctctccctctctctatacacaatggcaaaaccctcaacctcgcttgttttgcatcttctctgcatctcaccaccatatgcaatgcagcattgcatcaacaatggtttatcgaacagtgcaacttcgaaataaagttcactggaaacgagtgccctgttggagcactgtgcagcgggcttattaacctaagctcccctctccatagggaagctcagccctctgctttgttcatctcttccacctctcacaaaccaaatcaaaccaatctgacagcagccaaacgccaaccccatggcaatggctaaaagaacctaaaaaaatctcttcttttttgcaaacatataggttaaaaaaaaggaaagaaaacgaaagggaagatcaaaccaagccccccttagacatctggctaaaaatcgtgtccccggtggtgctagcttcctcaatggatgcccgtcagctccagcctgatctgcttactcctcgccgcggccaccgccgaggcgaaggcggcggccctggcatcatcaactagaacagaatgatatgtactagtggcaatctcgtcggggcctgaacatggcaatgatctcttgctgcctctcctgctcatgtccccaaccatcatgctgtagcaggcatgtacatgctcctggtcagagaaacaggcacgttgactcaacagagaaatggtgaagtggagttcatcgaatccaaggtccatccagacagaacactaactatggtcaaaatgctacacagctacgtactagaagatggaagcaagtgactcaccttctcaataagataagatggagaaagacagctcatcttaaagcccagtgcttcatatggtcagcagaggtccgtag

SEQ ID NO: 8263 - DNA, 1098 bp, Zea mays
agccagctgaagaactgggtgaccgcgatcaccgcggccgtcgcgctcgccatccacgtcgtcgccacctacgtgctagtgcgtctcctcgacttcggcatcgtcggggccgtcgcctctgcggacatggcgtggtggttggtcgtgctgggccagtacgtctacgtcgtcggcggctggtgcccgctgtcgtggaaggggttcaccatggaggcgttcgccgacttctgggagttcatcaagctctcctcggcctccggagtgatgctctggttcgtgttgcattgtcgtcgtcgccgccgtccatttcgtagcttaattagtttctctagcttcatgatttgctcacctgcttgcagcttggagaactggtactaccgagtgttggtgttgctgacagggtacctggacaacgctgaaatcgctgtggatgcactctccatatggtaacctttttgttgttgttgttgttgttgaggaacccttcatatagatatggtaactgcacgtacggtggtgcttattggcaaataaaatgcagtcagacgatcaacggatgggagatgatgatcccgttcggcttcttagcagcaaccgggtacgtatatgtacaggatcggcatcggcatctctctctctctctctctctctctctctctctcttaaaaaaaatggaacggaaacatgaatcggtgtgatgcatggcatggcagggtgcgagtcgcaaatgagctcggcgcagggagcggcaaaggtgcgcgcttcgccatcgtggtgtccatcacgacgtccgtggtgatcggcctcgtcttctggtgcctcatcctctacttcgacgacaagatcgcgcttctcttcacgtccagcgcggtcgtgctcgacgccgtgcaccacctgtccgtgctgctcgcattcaccatcctgctcaacagtgtgcagcccgtcctctcaggcaagccgctgaacgacccgtccgagcgtcctagcttgttgccctcagctagcattgtcttgttccttttgatcggccaattcagctagctcattcagcatgcatgagcaatgctagctaacccggccggccgggctctgttgctt

SEQ ID NO: 8264 - DNA, 1093 bp, Zea mays
ttgtactggccagctggtgcaatgtaacttattttccccatagaacccggtggaagagcaacatggtgctgcatcaatgtgttctcaaaaacagtctgcaacacacacccagtccgcaatcattaggatgtaaacacgggttaacagcatgcatttacatatcacagacagctagtcttcagaatgaagccatagatggaagtcaatgtcataagaacttacagcgtatagatctccacctgtgatgacatctccaacacctggaaatatagcacaagaaaacctatttagatagcatcaaagttcaaatacaacttagagataacaaaaacagcatgcaaaaccatttcaacaatggaggtactacattaagtcactacctagctttgttggctgaaattcccacaatacatctttgtcaagggcaggaactgaaacaccacgaggaatatacacatctcctgacttaatagcgatggtttttagaggtcgctgcaaacataatagagggcgagtgaggataatagacaaaaaataatgtaaatggccgcaaaagtaagccctgtcgtgttcagcacacctggataccgtcaaaaatgtttccaagaattccaggtcccaattcaactgaaagaggctgcatgggaatagccattacatgttaaatgatagcaaaagaatgatattaaaagatatagtaagatctgaagacaactaaaacaaacctttcttgttctcaatacagggtcattaaccatcagtccagctgtttcctcataaactgcaacacgcaaatgacggcactcgcgaggttagtaccctgtattcaactggaaaggagcttttcatgcccatgggtgaataatttattatagatgatctgccatgttgcataccttggattgtagctgaatcgccctcaagacggataatttccccaatgaggttatcatgtccgacacgaacaagttcatacatggcagcaccacccattccatcagccacaaccacaggtccagagacctgcaataacccagcatcaaggctaatcaaagtggggcttgttatatacataactgcaggcatgcaagat

SEQ ID NO: 8265 - DNA, 1157 bp, Zea mays
ttttccaccactgcatgacattttcttctccaacctgaggagtaaaactttggaggttgacttgtccaagcagcataaaccaaacattcctcgcaaagacacaccctacaagtagatgatctatagtctcaggctcttggtcacaaagggggcatttctcaggatgattgagacctctttttttgtagcctgtcagctggccagcaccttttcaaggcagctaacaaaagaaaaaaattgcattcaggaggtgcccaggaatgccaaattcgctcccagtgatcaaagtgtgtggatccaataaatagtccaatatagactgcttttgcagaatattttccatcagatgcaatactgaaaatgtgcttatcattacaccctggataaatattgactgaaagcaggttttctgataggtcaagaaaatctacaagcaccccgacagtaagcacacccttaatatcagttatccatttgttatctgcaagagcgtcctgaacaattctgcactttctgtattgcttgggaagagccgcaatcaatctaggagcaaagtcttctattctttttcccaaaatccaatggtcttgccaaagcagggttgaagcaccatctccaatttcagtatacattacagctgaaaagaaatatctaaccttttcagagaggtgtataggtaggaatgcccatggcttagaaggatcagttttggccaaccacagccatctcattttaagggcccaacccaattcttctaggcttaaaatacccatccctcccaactcaattggtctacaaacccttccccacgcccctaaacagtgaccacaactaacctctcttcctttccgtatgaatccctcccaactcaattggtctacaacccaattttatctatagccttgagagctcctggaggcaaatcaacagccattgcgaggtaaataagttttcctgtcatcacatattgaacttgaacctttctcccagcccttgacaataattcagctttccacccatgtaattggtcagcaactttatcgataatgggctgcactagccctctggttagtctcattagtgacagggacaagccgatataagtgcaagggaaggaagacctggcaaggcagctgctgctgcaggcatgcaagatg

SEQ ID NO: 8266 - DNA, 1064 bp, Zea mays
atacctactgctcagcagacggagctggtgtacgttctcaatctggcatgcgttcttcttccctttccgcgcatcagcgatgatgtagctaaaagcaggctgttcgacaaccgttcgagcagccgaagacgcgcatttcgattggcaagctgctgctgacggcctcatccgcgacggggtctggcaggacctggacctggaggtagtagacgaggaccggcgcagagctggaacgggcagagaaacggcctgcttgatcgggcggcaggtgggtttagagctctccgacatctgcgaggaggcgtcgctgctggagtccgccgccttgtctttccttctccggtgaacgatctgcgccgtctcgttcgatggtccccgcttcacgctcttgccggttgctgcgccttcacatggacgcgtcctccttggaggagaacgtcctgctgaagcatctgacgacgaagaggcgtcagacctgctagccttttccgcagaagcggcggttgtcgaagagaggccagccatcatccccggccaccagtgtttatcggcgagggcgacactgttggcaggggactccggagggcgagcattctcgtgttggctttggtcgccggtgttgctcttgctcgtgctccttccacgaggtcgagggctcgtgctcgtcttcctctcagccacagctcctggcctcagtctgaccaccggctctgaaggtaggccacggactagcctgtctaccttactggcagtggcaggggactgcccgtgctctgcctctggtcgaagcaggggagacgagcacgagctccgcgccgacgcccacgggcggtcggagtctttgcccttccttgcacggggtggagtgccgtgtccatcggcggccgcgtcacgtggagacacggcagacgcggacctcgccgcggccgagggcttcagccgagaggacggcgcaggagaaggcgcggcagccgaccgcgctccgttgcacgtcgccgagccgccgtccgcagaggcggggccggggctcggagaaccgcaccgcctcgctgcaggcatgcaag

SEQ ID NO: 8267 - DNA, 1083 bp, Zea mays
gtgcttgcagttctgtcgtccggcctcttcacatggctaggtacactaggtagctcgtggtcgtggccgccggattgccttgcgcggttcggttccgcccttgaccccgtcccggcgacggcgaagcctagctagcaacgtgccaaactacggccggccatgcatcgtacgtccactacaacggagcaaccgcatgcatgaatacaagagagggcagggcaggtaccaccaattcgtctcatgcatctctcatgtctaaaatgtcacctggacctgtggctcgatctggctgtactcctgcgcgtacttactaactagctatgacctcgatctgtgttgtggatggccccgtcgtcgcgtatacccataaactagctagctagacgactactctctacagctagcagcgcagttagcgcagcacaaaagacaagcaagaggttgtttgcactctagatcgaatcgacacaccaggtagctagctagctagctgcgagacgatggaggacctactcgaacgacgacgtacgtacgctggcatgcagcacacgtacgcatgcatcggtgtcggtgctgagctgtacagtcgtacaacgacgacaactgtagtgtactactacgactctacacgctgtacgtacgcagctagagctgcatgcattggcatggtagctcgtagcagtcatggatggtagtagctagactgcgcgctgcatgcagtggagggtacagacacaggagtgatgcgcatgtacatcggtagctagccgcaggctggaggccagcaggggggtgctggctgggtccccgacttcttccggcctgtggtggtggtgtccgtcgtccggcaggccgggcgccggcggatgcatgcatggatgtgggccggccgatcgatcggagccgcacccgcgcgcgcgcctacctttgtggctgggtgggtcgtctgagatggacgggacggagacggaggccagcccaggggagcccccggccggcacggcgcacgcaacacgcgcacacatgcatccccacggccaaaagcgactggccggccactgtgtgctgcaggcatgcaagatg

SEQ ID NO: 8268 - DNA, 1154 bp, Zea mays
gcttcttgcatgcctgcagaaggaacatgcctcctactatccctttccctgatccttctgttgtcatctggtctgactacatctactgaatgccttcccggtcttgtttgtacatttgagggtgattcaaagaggaggtcactcaccttctcatctacacagagcgagctccttggaggtgccatcttcttcaccccctctggcttgctaacctgagctctctttccccaattactgaaccaacctttcttgtcatgcttactctccccatttccagaaacactcatgtcctcaatgggtacctccctctcccttggctcaaagcaactatgtcgagggccagcaaatgagtcagattggtcttccccaccggcatccggagaatccatttttagcgcagcctccaactgcttcttctcctcctctgtcagaacatcatcaaacccctcgctctctgtatcattgtcattgctagatgaaaagaattcttcatccgtcatcgctcccgggaccctccttgacttgacactgaccagcacatgattcatttcatacaccttggccttccacgggccaacggcctctgtccgttcctgccgccgccatgtgagctgtgggagcaacagcgcttgggtgacgtcaatccccggacggaagatgttggtctgtgacattgcagcgacctcctgctggacttctgcatctgaggctggggtgcctgccccctccagcgcgttcataatctccttgtccttgtggttgatcatgcacagtgaaccaggcggcaccttgccatcctccgacccttccccgagaaaaagaatggtctggtcggagcgttggatcttgaagccatcgaaaccagcgagggtcatgtcggcgcggaggttggagccacgcttccagaccctgtaggtgtcggagggcgcgatgcgggaaatgaatgggatgacagagctctcaaaatggaaggtgatctccatgtagaagtcccgcatccggcgcatggcggcgacgacgcggggcagtcggcggcaccacttggcccaggcgaggggctggtagtggcgcacgatgacgcgcgccagggcctcctcgcgcgtgcagatggcctcctggagggcgctccaaccctgctcgttctgcaggcatca

SEQ ID NO: 8269 - DNA, 687 bp, Zea mays
tcccttgccgttgccgacctcgtcgtcctcctcctcctggatcgccagaaggcacctcgccacggcagcaccgcacagccagctacccccagcaggagcgccctgccgccgtttcttgccacagtttgcgtcggtggggagtgcgccccgctcgccggctccgccatgccgagacggcgagcagagcgagcggccaccgcaggagccaaatgtcttgagtgcctcgcagatgttgaccgggatctggtacacccagccctggttcttgctctggggtccgtcccggtcgtcgccggcgcggcgaaagctgacctctgcgctcccgactccgccgcgtctggagcaggagtgcagagtggcggctgaggtgtgcttgggcttgcgcttaccgcccttgacgcggacttggccgatgcaggtgaccttgggagaggacggctcggcaggttcgaatccaccccggctgcggcggccaccgccggtggacccggacgggaacattggggactggcagcccttgaggctgccgctgttgcggaggcggcggctgagtgaggggtgcacagggggggccggcactgtctcagctccgcttgcgctggcactaccgcggccggggctgaggagcttggaggagctggaggggcggagggaagactgcgcgctgccgccggcgacaggagcgga

SEQ ID NO: 8270 - DNA, 1158 bp, Zea mays
agaggtacatcgccggctttgcgctccctgttccggccttctctcccgttacccatttgagcttcttgtaaccaaacctaccaattagcctgacgagcacctgcctccgttcatcgctgtggcacacgtagctgtcaatccagagcagcccacgggcgcgcagcacccggtcgatatcaaacatgaagaactcaagcgcctcctccgtcccggcctgacccagcgccggcgaccctccttcggccagcgcggtggtcccgacgtgcacgaggtcgaacaccccgtcgtagaacgggaaccggtgcgccggcgagagcagcagcgggaacagccccctggccgccacgaactcgttcatgggcttcccggcgctgtcgagcaccgtggtgaagacggtgaccccgcgctccctcatccgggcggcgaagttggcggcgccgccggcgacgtcgaagccgatccggatcttgctgccgccgccggcgaggcgcaggacgtcgtcgatgaggaactcgtggtcgtggcgcggcttcacccagcggtggctgtcgacgcccatgttggaggccgggagcgcggcgcgcgggccccgggagaggcaacggcggcggggcagcggctcgcaggccttagagatgaggcggtgcgggagcgtggcgttgcgccgcgggcaggcggtgtggggcgtgtaggtggcgaaggcggcgaggagcgccagcgtgggcggggagcggaagcaggcgtgcgccacggaggccggcatgtgggtgagccccgtgcgcgcgtcgcggcccagcgggagcgcgtgcggggacaggaagaggagcagctccgggggcagggcgccaccgccgtggcgcgggacgaggcgggtcgcgtcgatctcccgcgcgatggcggccacctgcgcggagatggcggaggaggaggagaggttggcggcgccggcggcggggacggagtgcgcgcggggggagagaaaggcgcggagcgccaggaggttggtggagaggagggaaagcagcacgagcaggttgagcagcgcggacgagcacagccacgccaggcgccgcccgccgcgccgggatgacgccacgttcagggacaccgaccccatcgcgcggcggcgccactgcccacggcctgcaggcatgcaag

SEQ ID NO: 8271 - DNA, 1145 bp, Zea mays
atttacttgcctgtacttagcccttcgtggttttgtctgagacactgcactattagctttgacagcaggtgcagcctgtaacatgctgctcccagctactttgctcatcagttctccaacctttgtggacttcttacgagagagaggctctgacagtgaagacaaatcccccaatgtgttgagcttctttcttttcctagtcatcaatgtatccttagagtgatgttcaggatcctcagttttctcagctgaatcatgcaacgaacgcttccctcgagttttgctcttaccactagatgcagaattaggcttgcctgtctctgccatgagttcagaaagtttcttcttcttcctaccatgctctgagatgggcactcgtttgcttattgagttttcattatgtcccaatcttctcttgccaggagaagtgggatcctcggcattgctatctccaagtctatgatacccatcctctgtgattctacccttcttgtgtgcagagcctgccccatgcccctgatttttttctttaagaatgggggcgtctttgcttttccctgttaattcctgaattccatcctttgccagccttttcaaaccctctaaagcatcttccttcttactcgtggatctcagtgtgcgtccagattttctctcactcaaagcatcacctactgccttcttggccaatgttctgctgtcagcaacagaaccagttttgagtccatctaaatgcttggaaatgtcagttttcttcttcgatgaactcttcatgcgctttgactttttccctcgactcaatgtatcatctccatctgtgtgtgtcatttctgtaatctcatcagtgccctcaaacatctcaaactcagggaggtcccttgagccccttgagcgattcaaggccctcagctgtgcttttacggtagcaaggacaagaagatcagcacccgccagtggtttctttcccagtgctgagatgtagtcaagaaatgttttgctatggaaggcatccctcgtgtagacagagtctacggccgcaccatacgccccttgccggataccagagttttgaacctcctgcttggtggcaatgctggaggtgaagcaaccgcacgagaggccagcctctacgcgtcgcccaacct

SEQ ID NO: 8272 - DNA, 1154 bp, Zea mays
actaacccagcgaaaagatttcgcgtatgaaaaattcagatggcagcctgaagcttgtgagatgccagagtttgaggcctcccagttcttgagaaggtacatactacatagccaacctccgatgaatttagagatgttgtatgccgcgctgtttggctaaatctttgagtcagcacagcacggaaacactaatccggatatgtttcagaatgcaggataaaaccatcgcttacgtgggcgattctctagggaggcagatgtttcagtcgatgatgtgtatggtcactggtggaaaggagaggctggatgtagaagatattggcgcagagtatggctttgtgttagcgccgggtgcaaaaaggccagacggctgggcctaccggttcccgagcaccaacacaacaattctataccactggtcatcaacgctctgtgatttggagcccctgaacccatcagaccgagcgaccagttatgccatgcacctggaccgcccgcctgcttttctgaagagcaacctccacaggctccatgtcctggtcctcaacaccggccaccactggaaccgggggaagctgagggcgaacaggtgggagatgtatctcggcggagcgccgaacaacgacaggaacaccgccgtcatttggaaggccaagaacttcaccgtccacaacgtcgtcagatgggtggacacgcagcttccccgccaccccaagctgaaggcgttctacaggtcgatatcgccccggcacttcttcaacggtgactgggacaccggaggcagctgcgacaacaccagccctctggccaagggagggagcggcgtccacctcgaccgttcggaggacgccgacgccgagggcgccgtgaggggcaccggggtcaggctcctggacgtcactgccctatcgcggctgagggacgaagggcatatttcacggtacagcatcaagaccacttctggcgttcaggattgcgtgcactggtgccttcccggcgtgcgtgacacctggaacgagatccttgcggcccagctatagcctgtagctgaatttgaagatgccaagggttatgtcgaattgtttatgggtgaagctcgtatatacagtaactaccccggagtaatacgttggtgccggagaccccatgctgct

SEQ ID NO: 8273 - DNA, 1103 bp, Zea mays
tcttgcatgcctgcagctttcttagactcttcttctttccttagcctttcctcttcaacagcttttgctgcttcctcttcttgtaatttctttgccaaatacttcgcctcccttcttctctgtttctcagctttctcctcctctttcctcctctggatccttgggtctttcttataagcattgtctacaagtgtgcgcactcgcgcatattccacctttttggccttctcttgtagctttgcattctgcctctccatccatctcttatgttcacgagattcagcttgctccaaatcgtactcatcatcatctggaaattctctccaactcttgaagttgtaccagaaattgtagaacttatcaacctcctctactggagtagtatcatctccaagagaaggaataggctgggtaacagaccagcgtccatttctcatgaaggctgggccaaaaactttgaagaagtcttgtggggcacagtctgttgggacatcatcatcaaactcatctgtagagtcataaatcctcctctttgtagggtctatgagaacttcataggcctcttggatggacttgaaatggctttctatctcatccttttttgcttgttttgcctcctctgttgtctctgcaagaatcagggcagcctgcttatctggatgatgtttgagagccatctcacggtaacttttccgaatttgatcttcagtggccaagaacctcaagtgccccaacccaagcaaagcatagtggtcctgctgttgactgccagatgacttcttcttccctttgctgctaaaggtatcagaagcagtattaaaatcttggcttttgtcatccgatgaaacgctgtgatcatcagtttctatatcttcatgctccgcaagaccaagaagcttcattgccgcagcatggaacgaatgaccagcaggttcatatttcaaagcttttacaggaaggcagtttgatgaaacatacagaggcaccccatctacaatctcctgggagaaagtgatcagaagacaactcttctgggacgccatatgccaatgatgtcaaattcttaattaacaaagctcctgaggcaagataaactgatacaa

SEQ ID NO: 8274 - DNA, 1224 bp, Zea mays
attcacacatcctgttactagcttttgcgtacgttacatcgattgatgacgacgaactgcatgcaaatggcgggtttgcttttgggttttatttccttttctttattacggtcaatgaatgaatgaatgtatcccgggccggccggccggtccccggacgaaatttcttcccctgccagccacgcaaatcggtttcgaggatctgaacgagtgcccgcacctgtgcgcgctgtcctacgattacctcaagaagacggagggctacgagcagaacctgctcgccttcttccacaacaagatgaacccggacgccctgctcgtgcagctcatcgaggagatggacaagtgcatcctcggctacttctccttccactggaaatatgcgacccacataatcacgcaggtatattatataacccaagtcctcctggtgattttatattacaataattattgagtgtgccacgcatatatactaatgtcgtcgtcgttgggtttacttgcattgcatatataaaataaaatcaggttctgacacacgagcagcctagaagaaagctcagaagaatggtaatggaggccactaggtaattaatccgatccggcacaatgcaagatgtgaaaacatcgtactacacataacaatgtttgttttcctttatgatcgattcatttttcggagaatatggatgaaaatttgacctctgttttgcgtcgtcttcggatacgtgagaaatggattctgttgctggttcttatcatacaggaagatgaggttcgagagggtgacgagagagctgaaggttaccaggctgttcaccacgctggtggaggagctcaaggccatcggtgtgcactgccagcacgaccacaaccgggcgggcacggacgtgatggtcccggctgcgcacagcgaccgcagcccggtgttgctcctgatgggcggtggcatgggtgctggcaagagcaccgtgctcaagcaaatcatgaaggagtgagtactctctgtctctcttctgtatctctctgtgtgtgtgagagagagagacagagagattctgcacgtacgttctcttactccgctgcgattctgcgatgcgatgcgatgcgatgcagggtgttctggactgaggcggcggcgaacgccgtggttgtggaggccgacgcgttcaaggagtcggacgtgatctaccaagccatcagctcgcggggccaccacaccga

SEQ ID NO: 8275 - DNA, 1124 bp, Zea mays
acggaatctagctagtggacgcttgcatgcatggctttgaaagcagcagcaaagccccaacgatccatggacataaatgcccccctctctctcctccatttactgggtcgatctgggggagagcaaatgcacatttattcgcgcgcgcgagcgagaggtgaggaaaggaaagggtcgggatcggagttttgagctcatcatcgcgcaacacccaccaatccaccatgcatgcagcacggaatctggtgctgtctttccaccgtacaccgtcgtcgtcgtccgtccaaatcaacctgacggttgcgttacgccggccgatcgcgtcttctgctagctcgtctctcttaattacctgtttctctctcatcggtcggatccattccaggtgtgggtttatgtcgctttggagtttggattgtacaagtcaacctgttgtagccggtaagatactctgtctctttttaaagtgtgcatatgatcatgctgcatccgtctctgtgtgtctgcaattcagacacctaatgtctccattcaatgctgtgccctatcaaagtgccataatgcttcctggagggaccatgatgagcttgcttgccttcaattaattaaacactccacgtacgtacgtacgtaattgagcctgtaccttcgtggcttcgtcccagctagctagctgctggatatataacttcagacgaagcgtcgtcgtctagaggaactaactgtccagtggtgatgcatggtgtggtggtggttaggcgccattgctcgcacagcatggcatgttttcttgcagcgagtcagcgacagagacgctagggcttttggaccgaagctgcgcatgcaggtgcatggtacactggaaccagcagtactgtttctcccttagctttccggccggcggccatactgtttggggatcttttcggttgaagatgctacacttgggtggttccggaggtgcacaaaagaagacagctagctccagagaaccagtagtgccagtacttcatgcatgcatagggaccatggttcatggttggggagaaccccggagcatgatttccagttgactcgaagcggaaggagagcaaaagaaatagatgattgtttcgtgttgttga

SEQ ID NO: 8276 - DNA, 1156 bp, Zea mays
gtggtccacaacatgattcccataagaatcagtcattaaacacatcattccagtatttaaggcggacactaacattgacacttggtcaggggtattcatggtgtctataaccttctgcacaacgcgggtcctgaaaattttcacaacaagatcaaagaaaaaaaatccaacaaataaaaaaaaagcagacctagtgtcaggagattcccacatgagtggggtctggagaagagataaatgctttgaacccatgacctggtcactcagtaagacagctctaaacactgcatcacgcctgcctttcttaaaaaaaaaccaacaaatatggatgataaaatagtaaaggttattgtgttcatacccatgcacattgcaagaagctttatgaagctttatgggtgctttagtgatttcacgaatcatgtgtgtcctttggtcattggtgcactcttcaagtatcttctgcaccaaatagtgagcagttggatccaccataagatcaccaacattgtcaattatttcaccaaagattttatcaatgtcctcttgagtgccttctgataataatttttgtagaaagcgacatgcatcttgatcctttgacagcatgcatactcttcccatcacttcatcaatggatttatatgtatcagattgtgaggacaagaacggggagttcagcaagcgagcataggaagataaatcaaaaaaatttactgaatttccaacatcaggtctcattcggatcctctccacgtaacttgctgtgttgagtttatcagatctttgatgatgtgagaaacctaagccatatggatgagcgatatcagatctttgatgatgtgataaacctaagccatatggatgactgaggttatcaccttgctggtgatacggtccatatgaattgaaaaccttttctgcccattgaaaatggtgaaaatcgccactgccacatgaactgccggtgtaagatgtacttgggaagctgtctgcaaatgtattattcagaccgccactatttcttcttttctgagaagcagcaccgtttaggtaagaatacccattttccagccaatgaaaatttggtgttccaatatatgatgaggatgggccctgtgcagtatggtagaaagcaggtcggcgaaataggata

SEQ ID NO: 8277 - DNA, 1184 bp, Zea mays
gcggccagccagcggtgcgccccgaacgcggcgccgctcagcaccaggttgcggtagaggacgttgatcgggagcatctgctcgatctccatgtgttcgacccaggtcacctacagcacacatgatatgaacgtgtcaggtcaggtcaggtcagtggcagcaaccatggcgtggcacagggcaatgcacgtgcacgtggagcacagctgcacaggagcatgagccgctcgtcgcgtcgaccaccttggagtagccgttcgacatgtcggcgatgaggcaccccgacggcatgcgacgggagcgggacggcacgccgtaatgggcgtcgcgctgcccctccagggagacgtccgcgacggcccacagcccctgctcgatctgcttgcagtagcggaggaagctcagctcgcgagtcggcacgaccggagtcatgatgtgcagctcctcatacatctgcacgacgcgcgccattagttttccttccaatgatcacatcacacgacattgtttccaatgattcgacggcgctaccatgattaaggactcgctcctcccgcccaagccgttcacgagaacatcgacggtttgcgccttggacacgatgccggggaagaattccatccacttgttctgcaacaacaacatggatcaaccatcgccatgggcgcggcgcgcggggagacgaagggaagttaaggaatgcgtacgtaccgtgtccatgaagacgtcgacgagcgcgacggcgctcatgaacacgaggcccgagtccctggacgcctcgacgttgatgtccggcgggcggaacgcggcgccgggcttggcgaagaggctgtcgtaagtagcgacgtcgagcacctccctcgcgtccccgggcacgcccttgacccagatttgctcgccggcctgggcgagccggatgagctcgtccatggcgcgcgccgccatgtcgaccatcatggggcgctccatttccgtcacgggcgccggcacctggtacggcagcccggacgagcagccgctgaggaggtcgaggtccagcgacggcccgccgagggagcccatcccgcccacggacaggtccagcgacgacatggacatggtcggcaccggaggcatctgcgtgaacggccggccgaggtacttggacgtgatgctcgacacccgatacagctgcaggcgtgcaa

SEQ ID NO: 8278 - DNA, 1200 bp, Zea mays
cttgcatgcctgcagggtaatggtcgacgcgattccaggtggcggcgcttggggagctggcggcccagcgagaagaggtagggggagggggcggcgaccaggaggggccggcgaggcagggcggagagagggggtggtggctggccagggggagctcaacgacggctatggggtgggagaagagagagaaaagaaaatgtggctctgatatcaagttggaatggaaatctctaaccctaacttagggttgggagtttgtattagtagaccaagtgatgttaggcctgatccattacataggggtatgaaggtaattacaagaggctaaccccaaaaccctaaacgggattctaataagcagcagcaagcattatcttgcaagttgattgaactgaataagatggtgaacatttttctcaaatatttgagctttaattttctaggttttcatctagcctgtattataacatgtcttgacagtttttcaaactaaatgtgagtacgtattctctcatttttcacactactgctgctaactaaaagggtgaatatgtattgaattctagaacatatcacgtgctgatgatgcatcaagacacatcgcctgatctcagaacggttggcaacaagctgaaagaagtcttcagggtattcatctttcagtcttaatgttaaattattctaccacttgttcagtccctacaaaacacattttcttgtttggttttcagatagaagacacctgtttcaaaacaaggaaattggtagtggatgtctgcgaggttgttgccagtcgcgctgcacgacttgctgctgctgggatacacggcatcctcaaaaagcttgggcgagacgttgccagcccagacaaacaaaagacggtgattgctgtggatggcggagtttacaagcattatactttcttcgcccagtgcatggagagcactcttagagacttgcttggggagggagtggcgtcctctttagtgataaaacttgccgaagatggctcaggcactggagcggcgctcttgtcagcctcctattctcaacgtctccaggccgtggatgattaatttctgcttgtagttccttcagattctgaaggtatagcaggtatacaattgctccaggggatatttgtctataacggttataacattcaactgccacattctttttttctgtcagccctgtgct

SEQ ID NO: 8279 - DNA, 1130 bp, Zea mays
cacatgatttcagtgcatatgggaatgtccggcctttaaatggcagctatttcgcttcggcgactggacgggttcacaattggaatggcatccagcaagagatcacgggcagggtgcagcggaaagttctttatgagatcagttctgctgttcgaatatttgggagtgccaatgatactgaagtgcgtgctactctgtgggtacaagaatatggtcgtgagcgatatgtgggactggccaagtaagttgtttttgtttcttgttctctgttgataatgctctttttcagagccaatgacattattccttttctttctataaccaaagaaaccagacttctgatcagcaatggacacatttgaaaggaaagttcctccttcatgctccctttaccaaagctgttattttcatagaagggcctcctgctggaattgacattcttgtagatggtcttgtcttatctccagcaagaaagctccaagctgcaccatgcccaaaaattgaggtttgtaggctaactgcttcttacagtctgagattatttgcttgtgaatgatcttgactcttgagacttgtgaaaccttttttttcttgttataactttcatctgtcatgatactgtaaaactgtcctctctaatcgaagaatatttatttactcaatattgcagaatgttctgtatggaactaatctattgcacaataatggcttcactcgtgggctttctgggtggagtcctatgggttcatgtcgattgagtatccagactgaagcaccccatatgttaccttctatcttgaaagaccgtgcaagccagaagcatataagtggtcattatatccttgccacgaaccgcacagatgtttggatgggtccttcgcaggtcataactgataagctaagattgcatgtcacttacagagtatctgcttgggtacgagttggttctggaggacatggacgtcaccatgtaaatgtctgtcttgctgtggataaaaaccaatgggtcaatggtgggcaagtggatgctgatggggatcaatggtatgaaataaaaggagcattcaaacttgaaaagcagccatccaaagttactgcatatgtcaaggccactcctgcaggcatgcaag

SEQ ID NO: 8280 - DNA, 580 bp, Zea mays
tcttgctttcaactgatttaaatccattatttgttaccagtgcatttgctattccttcaacactgtattttctacttcaggttctatccctgacctatttctgttcttgacatcttacatctctacatatgttgtagtcttgctatcttactttctccacattaattgcatctgttaactaagccttgctgcggtttcttattgttttacagacatatgttgtaaagccttactaccttaagcgagaaaagcagaaaacactagaaaagatggaaggcttatctacacaggtatcatgaggttattgtgtgtattcacatttgtgaatggaggtggaactcaatgtacttttgtctttggttaggtggtgcattataaatccattcctcacactagtactaattattagcttatgaggaatgaggtgttgatgcatcaatccattccataaactaaacaaaaaaaggagtgagaagactaactcactctttaaaccaaacaccctattaatgtatagttttgttttggaacaatcacccagatttggttgccacatactagtctaaatggtatgcatatg

SEQ ID NO: 8281 - DNA, 556 bp, Zea mays
agcttgcatgcctgcaggtaacagataagaaaattcagtgcagagtaaccatgcaactatttgctaccttgcagaaaagtgtaaatttcggggtttcaagcgcgtatatagaattccaatctattttcaggttgcaacccatacgcaaagccagtggcaaaattgcaaatgcccagcagaaacttgagtaggttcatatcttgggaaaaaaaaacacttgtcaccaatgtaactcgaatgtaccttgagctggcctgcctcagtaacgaggaagttcagtgggatggtcacatcaaatacttgtgaagccatgtcattgtgtatatcattcaattcactgctcattttgattttttggcgactgccatatagagcctttgttatcaccaatccgttgttctctagctgtctattcttcttacggttggagacaggttccagtaatttttgagctttttcagctgcctttctggcttcagttagctatacaggaaaatgatatcttcaattagttgctaattcttttcaaaaagcacttgaacatagaaaagcagtt

SEQ ID NO: 8282 - DNA, 1192 bp, Zea mays
taacccatgaaaggtgcaaccaaattgaaatgcttgtttggttaaaaagcaatatgatatgatttatgctgtgtatgcgcaaagctaaaaaggtcaagctaaagtaaactatgctgacttatggaaagctgacaatactgacaaaatagagtcaagcaattttaagttccagcagcaacacgaaaacatgatagctcattagcttctgtaggaattgtagccaaaaaaatgatggatgaaaatctataccacaaggatgctatgaataatcacattgagtttggttactcgagttcatgctgatgagtggttgcacctcctgtataaagtaaaaagctcaccttttcagaaaatccaaatttttttcacgtccaaaacggcccacatgtattaccaatggtttttctggttcaccaccactaatgggagaggaaaagaaattgtgttattccatgttaacactctgttattaaaaattgaagcaagccgtgatacctcaatctgacacgcatttcgtgcctccgatatttagtatgaaagctttcagaatctacacccttattccaaagccgtattctgtttgctgaagaagcatggaaggtcatgtttagcatggatagagggatcaaaaataaaaaacattaataatattgtcactacttaacctggcactactttagcggtttcaaagtcttcagcaatagctaatgaaggaactagagtaagatctgctgatctgtggaggcaccctttgaaaacaaaagagattcagcacgcagtaatgaaaaaccattaagtttttatagaccacttttcatttgctgagaacaaaataggagtgacaatattgtggcttacttataaaactccacgtgggctcaagtaaccaatttaaattgtatctcggtatgtacctgcaagccataacagcacatgaattcaaaaccacaaaagcgttaacagccatgacatcgaatattaaaatttgtaatggaaataaatgatacaacccagctgatgtgtactagaaaaatgaaaaatgttcaatcattgttctatcatatcagaagcagaaagtgagttcattgatttcctcacacatacatctatgtgggagttcctttgttttgtattgcgacaaacctgtactggatatatgtccacactccacatgcactataccaattaagct

SEQ ID NO: 8283 - DNA, 1106 bp, Zea mays
tgctcatggagatactctaaccccctgtccagttaaagttaccaatgcatgttataagatataaactactagccggccgggcggccgggccaatcatcagcacttcaatttaaaatccatcgcccattcactcatttgaaggaaagtgcagggataagatcgtaagaacctggccatgtcgagtgcgatcttcatccggacatgccagctcagggctgatccacgtgaagcccctgaagacagccagccacacatggaaaggtcccagtatgaagatctcaagaaagagctgcatccataagcaaaacaagaggaaccatataggaggctaccaactaccataccatgcagctgtgtgtccagggatcccttgtgcatgagctcataaacaatgtagtgattcccctcgtgaacacaaaagcccagcagggtcacaatgttggggtgccgaatcctgccgagcaaatccagctcattctgccaacaaccacagccgaagtagtcagggacaagaacaaataacccccgcccccctcgtcggacgtcggcaatggccaatggacaagaatttgacactgacactcacctcgaattccttctcgcattcagggccgcctgcttccagcctcttgaccgccgcggcgacaccgccatcgaaaactgccttgtagacgcaaccgaagccgccgacaccgagcacgttgctcgcgctgaacttccctgtcgccgcctccagcgacgggtactcgatcatcgccatcgccacaacccccttcctgctcgtcttgagcgagttgaacttgctgaggatcggcgccagcatgatccccctcgcggtgtctgcgcgcaacgtacgtacgtaggtgagcgggccatgagcaattgagttgagagccagcggccagccgatgcgatgcgatgcgcagtccagagagaagtagagccaagagacctgcgctcctggcgcccttattgccgcggggcagccggcgagaccgccgccacaggacccacgcgtacagcgcggaaaggataatcgcggcgatggcgatggaggcgagggcggaggcgacgactagctcccggtggaaacgattgcgccgctc

SEQ ID NO: 8284 - DNA, 1213 bp, Zea mays
tcccaggatcctctgagtctacctgcagttagtagcaaattaagtagcatccacatgcgaaggagcattagtagatcctattctacacagcctaatatcagataaataccttattactattttaattattagaccctcgtaattgaagtgttgataacatcacagctttttgtgtcatttcagctctaacaagcatggtaattaagactacattgaggtataaaagttaacaagatatattgtgtacacattaacaacaaaaatcagatggcaagttaatcagtgtaggaatactgaatcagaaatgatctacagcctacacaaaaatcttctatacaaagtgcagtgttttactggtttccagtagcaacttaacaattctttattctttatgcagcactgacacaccgacttatcactcttgattctagcatgtggactgatgtcatatcagattttaaattcgctgcatgaaaacatgtagcctaacatataataaaggctatactccctctatttcaaattataggaagttgtggcttttctagatacattggttttattatgtatctaatctagacatagtgtataattgtatactccctccgtcccgtaatataaggcgtaaccttttttagtcttgtcccatgatataaggtgctctctctctctagacacatgtatatcaatacagtagtgctagtgttgatagagagaattaaatacatttcttggtctctgaaccagaggtggttacgcgttatatcctaggacgaagggagtatttacatgcataacaaaagttatgaatctagaaaaagcaaaaatatctaataatttggaatagagggagtactacggaaaataggaaagatctagagttctatagtccatccaagctatggacgaaaaaagcgaggattaagtgatcactccaatggtgcatgagagtgcgggtaattatgaataagagaaaattacatatttaggattctaaacattgcgcttcgcaataatgccatctgaaagatttgtttcgcaaaaaaggtactataaacgttttctaattgattatactaccctttactctatattcttccttttataatttgtttccatgtatttagtatccaaggggacaaaattaccctctacatgcttttacgaccactctcccctatcttcagattctcttgccatggacgatcgcaca

SEQ ID NO: 8285 - DNA, 1300 bp, Zea mays
gcatggtcaacggcacggccgtgggctcggggctcgcgtcgatggtgctcttcgaggccaacgtgctcgccgtcctggccgaggtcatgtccgccgtgttctgcgaggtcatgaacggcaagccggagttcaccgaccacctgacccacaagctgaagcaccacccggggcagatcgagtctgcggccatcatggagcacatacttgaaggcagctcctacatgaagcttgccaaggagcagggagagcttgacccgctgatgaagccgaagcaggacaggtacgcgatccgcacgacgccgcagtggctcggcccgcaggtcgaggtcatccgcttcgctaccaagtcgatcgagcgggagatcaactccgtcaacgacaacccaatcatcgacgtcgcccgtggcaaggcgctccacggtggcaacttccagggcactcccgtcggggtgtccatggacaatactcgtctggccgtcgctgccatcggcaagctcatgttcgcgcagttctccgagcttgtcagtagcttctacagcaatggccttccctccaacctgtccggcgggcgcaacccgagcttggactacggtttcaatggcgctgaggtcgccatggcgtcctactgctctgagctccagttccttgccaaccctgtgacaaaccatgtgcagacagcggagcagcacaaccagagcgtcaactctctcggcctcatctcctccaggatgaccgccgaggccgtcaccatcctgaagctcatgtcctccactttcctgatcgcactgtgccaggccgtcgacctgcgccaactcgaggagagcatcaaggccgctgttaagaagtgcgtgtcgcatgtcgccaaaaaatccctggccatcgacgaccacgacctgctcgtcgctattgaccgcgtggcggtgttcacgtacgcagaagacccgtgcagacccagctatccactgatgcagaagctccgcgcggtgctcatggagcatgcgctcatcaatggtgacagcaacaccgagcgacctatggagacctccatcctggccaaggtggctgagttcgagaagcagctcagcgcagtgctaccggacgaggtggaggccgcacgagcggctgtggagagtggcacgaccccgaacaggattaccgagtgccgttcgtacccgctgtacaggttcgtgcgcgaggagctcggcgccgagtacctgaccggcgagaagacgcggtcgcccggggaggaggtggacaaggtggtgatcgccatgaaccagcgcaagcacatcgacccact

SEQ ID NO: 8286 - DNA, 1214 bp, Zea mays
cttgcatgcctgcagcgcgagcctgaccgtgtgcgccggcgagcgcgccatccagtgcgcgcaatgctgcggcgtgactcgcatccggcggtcgctgtcctcgcggctcccgctgccggcgctgacgaggccggcttccgtcgcgggcttcccgccgtgcggcggccgcggcaagaagcgcgccgtcctgatcggcatcacgtacggcggcgcgcgccggggctgcggcgagctgcggggccccatcaacgacgtcaagtgcatgaggcagctcctctgccagcgcttcgccttccccagcgacggcatcatcatgctcactggtatgcaatggaaccgtccacgtacgcatctctgtttgtcgcaaggaactgaatggaccggaccggaccggtgcacgcagacgaccagaaggacccgttccgggtgcccaccaaggacaacatccggatggcgatgcagtggctggtgcaggggtgcagcagcggcgactccctggtgttccacttctctgggctgggcgcgcaggtcgccgacgcggactgcgacgagcaggacgggtacgacgaggccatctgcccggtggactcgttccagaagggccccatcctggacgacgagatcaacgagaccatcgtccggccgctggtgcccggcgccaagctccacgccgtcgtcgacgcgtgccacagcgattccgtcctcgacctccccttcctctgcaacatgtccaggtaattatatttgaaagctcgtcgtccggtgctggaaatcccgtgcccgtacatctaaaacatatctccattcctctctctgtctgtctaggaccgggaactggcagtgggaggatcaccgtccaccgtcgggcgtctgcaagggcacgagcggcggccaggcggtgcttatcagcggctacagcgacggcaaaagcaagttcagcatggtcagtgcactgcactgcacacccatcctatactcctactatatatggtcgccatgaacgtaacgctcgctcgatctaatctctttgcgattggttcgacacgcgacgcgcgccatgttctgttgcagacgccggaggcctgcgcgacggtgggggccatgacccacagcttcatcaaggcggtggaatgcgagccccaaggggtcacctacggccgcctgctcacctccatgaaagccatcatgaccaacgccggcggctgcaaccagca

SEQ ID NO: 8287 - DNA, 1180 bp, Zea mays
cgctgccacattgttggatcgcaatcttcttgtgacattggcagtgttttgcacatcttttttttttggtttattgttatgaggagaagtaacacagtgtgagttgtgacacatccatgccaatgccaaattaaaacgacagtgatggcttggagcaggttgcggtaatccactcgctggttgggttgggtgacagacaagcagcttcagtgaagtctactactggatggatgatggatcccattcccatcatcccagctatcaccgaatcacggcacggcgacatgtgctgatgtgcatgggtttaggagatcagtgagatcattgtcattgcgtcggtatacaggtacgccacgccccggcacctcctgctagcatgcagtagcagcagacggcgcatgtgggtgtgggcagtgcccccacgctagctcctctggcacggcgggcgaggcccctcccctcccctcccctctccctccgtccagtccagtcccattcggcattcgccggtctccgatccgcccgccgtgacgccatgcatgcatgtgatcctctgcactgtaaagctcctccggctgtccgcatgcgcgccagccgtgtcagacagctagtgcagcgcagacgcatggcagacggcactccggcgtggttggcctccgtcccgcgatctccggacggactggactggtgctgacggacgctgatggacgccagcccacgcgaagcacagcccctctactacctggctggcctcaagcgtcgtcagtcactgcttgctatgctttgctggatagtagagtggatgctgccgcggccacggtctccgttgctcagctcactggcggcgttcgtcactgtacgtggctgccacgcacgcatcacttcaattccgaaagatcggaggacggacccatggatggatgagctgtttcgttttctttcttcattcaagcgtccatgtcgacggacgaacagaggcaggagacactggacgccccacatgggcagggcaacggaagcctagtgcctgcacagagagaggagccatagatgggctgttgctctgctctctgggcttggtgacaagacacagaacaaaatgaaagacagttgggacgggaagggatagcctgcctgtctgtgtgtctgtctgtcttccccatttaaggacactgtgctg

SEQ ID NO: 8288 - DNA, 1223 bp, Zea mays
ggaacatgatcggaagcaagccctcgggtaactttgtctataactgtgctgtcatggggtgctgatacgtgcgcccctcaaaacataccgtcgacgacacacgaaagattgtgatattgggtttttttttattatcaaatggcataaagcactgattaattccgcctgacgggtaatctctgcattcttttttttgacatttcagattttactcaaggttcgtccaatagagctagtcggttccgtgtactcgttaatagctagctacccattggttcctgtgctcagcacattctatttgcagtccatctgtacctttggtccatatgatatactctgttgaaatgagtttttttctgagatggacgcgtacaggtgataaattgtaattggggggtgggtaaccgcgcatctatatgatttgtttgtatcatgttctgaaccgtgtctcaacgctgtaattctattgtgcaaatgtctcttttccaagaactgcatgaaaaaaaaaagaaaagaaagtgcccatctgtacatcccccagcataaatttgagcaccgacttggaaacagttggtgctgaagtccttccacttcctttccagtagagcctgccctatgagatattattatcagcgagtgttaggcaggcgaggtgaccactttattataatccagcaggagggcgacaagtgcggagctaatcagtatatcattgtctggcaggttgagtggttgggtgctctgtgtcgtggagattgagaggccatgttttgtttgtcgagttgtgcctataatagcctggcgtgggtttgttcggacccgtcagtttgcagcgtaggatcattggctagaatttctaacgcatcatcatagacatattagtgaaaaatatacgggtatttcaaacctaagacgcgcgctgtatccacgcacgatccgagtggatctgctgctgctgctgctactactaaaaagaataggacctcatttggcctgttgtgatcattgtggtgtccctggtcaatcatgcattcacgcatcatttctgttcgtcgagcagttttctgctttagcagtagcgctccggactctcgtccacgcgcgcattcgatttcttggtgctgctgctgctgctgtggcatcatttgtgatcattgggcgacagctcctggtttcgttgacgagagcctaaaaccatcatccccgggctgcaggcagcaagc

SEQ ID NO: 8289 - DNA, 1153 bp, Zea mays
aacaggtctttctactctttatcggctttatttatacatatcttaatgtggtttatctttggtttttgatggttggctgagataattttttatggccaaatttccaatattgaaatgcttgagaaacattgaacatctgttgattttcttctccagatactactggtagagataccaaaatatttgcatatcaggctatcggtttgcttgcatctcgcatgccaaatttattcaggcatgatattttcttaaagctttcttggctctttttccatttgtgctatataaggaataatatttctacctcaattatattgcagtgataaaactgacatggctatacgactttttactgctttgagattggaggatcaatctcttcgtttgacaattcaagaggcagctacttcccttgctacatcatataaggtatatctggagagcatgttgctttctacaaagtgtgcttcacaaagatgattttaaattgtaattaatttatcatttgtgcagtactttttttgtctgaatggttggtgcaacttgtaaatgctagcttattgttattggttgatgcaaagaagtccatattcttttggaggattatcagttaagtttattctcttttttcttggccttgataccagcgtgcttccacgatagtactgaaggatcttgagtcacttcttctggaaaattgtgaagcggtaatgtttttaacatcataggttcttaattcattattgtgctaatcctttgttctcaacatttatatatggttttcgtcgttggtgatagttttgaatgcaaatacaatcaattttagtatgagggtcacacgatcaaaaacccaagtccttgctttaggaacatcaaggaaggtccacaccttggttttaaaggcggctaggcggaactaggcgcccagccaccgcctgaacgcctaggcgacgccttaccaagccaccaaacagctgttacagctcataaactagaaatcatcacaaattcacaatagcataatagtggatctgaaatagccataaaatagtttctaaatgaacaatagcaagtcacaaaatttaaaacaacacaataccaaatctgaaatagccacatagatagtttctaatggcataattaatagtaacta

SEQ ID NO: 8290 - DNA, 595 bp, Zea mays
agagcagagtaagcacctcttcccaggcacccgatcatcccatgatccgttcctctgtgcacacgcctcttggcccggactccctcgttcgcaccgcgcgtgcctgcctctgcctatagcgtcgcgctaggtttcggtaggcgaatcattcgatttttcaagctattcggacggtgctcgataggaattccaacgcataggagtatcaaacgattaacttagggcctgtttgtttaccccatagattatataatctggattaaataatcctaaaagacaaacaaacagtctagcttatttgcccagattatataatctaaccccttggattatgataatccataagcaagtgaggatgtgcttatttcagattatttttttcccacttccccactaccctttcaagtttcctagaaattacccaccattgccattataatctaccgaatcgtttttgcgcctatcggatcggagaagcccgccgcccaacagaaacacgccagataatctgggtaaacaaacagcactactcagattatataattcaaattatataatccagattatataatcctccaaaaataatccagattat

SEQ ID NO: 8291 - DNA, 1187 bp, Zea mays
aattatatatcgttgatggggatacacattgaggaaccctgacttttaagccggccaaatcaaaataaaagctgtcgatcgactaataatataattaataacttgtaaattggaattaaagcgtggcccaggttatgatgtggtgcttaaaatatattgcacaaccagagcacaaattggacacctgatgtctataatactaaagtgcattgggagcaaagctgtggaataattaattgtagtacaatggccggcagatacggttgctgtatctttatttgcatatataattccatatgcaaagtttatatttaatactattttgtgattaactatagaaaagcctccttcagccacccatgctaaatatcactactaagagtttgtacaacctagctagagtcttctgaccggttttctaagcacaagagacatataaggaactgcattatataatagagtgtttttaaaatcaatcacatcataaatacatttagtaaataatgtgtatcaaaagtcgtgtatggacgagctcttcacgaagaactagtctcttgtatttttttatttaacccacgtaaagaaccctcaagagatcagggtactaaatgaggttgtacatcgctaaataggatagattatcgagtgaaaagcaccaaattaagtgatggttttggtgtagtgcgtacatgccactccaattcactgattactggaaagccatcataacggcacatacaaacatccgtgtacgttaggtgaggaaaaatagccaataattaatatatacctacggccaatacacatgttgcggggaaaaaaagatgaacacggagagaacactctggcttggaggcgaatcagatcaagaatacctttgtggttgtgggtggaaaagtgctagtatcacctcacaaaaagtccagacatgtatttattgtgttcgccatcgaacatgtgttagccctgtttaattaagatcgtcttggataggcagtgtacaatagggcacacgaaactgtacacgatactgtttatagagtatagtttgaaataaaaaaaataagacacgagatgtgatagtagatctgctcgagatagcctaagggcttatttgtttcgcctagaaaacaaaaaaaacccaccttttgatctaaaaatctaataaaactctgcaggcatgcaag

SEQ ID NO: 8292 - DNA, 1144 bp, Zea mays
acagcgctgcgcagcgcatcagagttctcttaacgagccacgatatatgatttcacgattcttttgtgcctgtatattgtgtttatgttgtttgcgtccgcccattccttccctattgcattggtaagtagtagcttcaggttcctagcaccggcgttctgattgtctgtgtatacgcggtactggttgtggtcttgtggatgtgagagattcttcatggttgctagtaaaaatagaaacggctgtgggagaagaaacagtaaatgaatccatgtttctttattctttattgcaacggtatttatacaagcgaaggagacatgaataggagatcggcgggtcacgtctatacaactggtgcacgtcggttggccatattctacgtgaagatcgtgcaaggagcacgtcgcttgaaaaacgtcggctggaagcagtcagcaacctcttatctttcataacagttgtgactggtttgtgggattgtgatggaaattctcagttttgcatgcttcgaagcacagtgctgggttttcctgtgctcctcgaagtcgagtacgctgctcaccgaggaaactggtaggctgcatttggaatcccgattgcatcgtcagtgacaacgaacccagccaccagccagcaccaacgtgatcagttatacgagtaacgagtagttacaaaaggcggccgggcaacagtaagctctcttgcgtgcctcaggcattgcgttctctacacgtcaggtgtttcagtggtcataaataacacaaccctaaaacccaaacaccctcgatctgccggttcgcatatccacctacagaggaggcattgaagggacctggtcatcctcgatcagcaacacatcagcgaagaaggggtcgcgtagacaatctccagcggactcgtaagacgccaggcgtttcttgagcgagcgaagctcccgctcgattttgttgccatgagcctagccaaaaaaaaaaaagttcgcatggatatattcgttgggtcacacacaggtaatgtcagtagaggctgaaatgcagagggggatgatgaactcacaggtgatttcagcttctgtagcaccatatctacaaggtagattaaccacaccacgtttgtcttcgggaagctgcaggcatgcaag

SEQ ID NO: 8293 - DNA, 1075 bp, Zea mays
tcttcagggtttgccagaccagccaggattttcagcctctctgtgtagggcacaatgttgtctactgcaaatcccttcaccttttccatctcatcattcataagcctctgcataacaggtcagtcagaaacttctgataaggaggtgcttttatctatatacaagagaaatctaccttgatgctgtcctgcaattgaggagagatctccttgtcaaaactgtcagataacttgaaatacagaactaggcttatcccgtcgccgtcgttgtcgccaaacactgtagcagggtatgtgggcagctgcacaaacaagtaaaaacttgtcaggctagaagccagaaattaacaattaacagtcagtaattaaagagcggttgttaagaaccgtttatagcctactgaattacctgaatgttcacaatgaggagggtaggaaaggcttcgtgtgtcttgagagacggaagcgagaggtgctgcgcaatgtgatgaatctttctcgtgtaggcgaacatgtctgctccaatgggggtgtaaggggagcagtctggggccgggtatttcctcttgtctctgcatgaatttcacagttcagtcaggcataatcatgtatacaatatcgtcagaattgtgtttacaatactgccactgtacgtacttgaagaagctctcccctcggaccctgaacgtcgatggctcaagaaccgaccagcaaccttccgacagcttctcgcccgtcgaacaacacggcaccgtgaaacctgcccttgggcggtacaagtaattcgcagaaccacctgggattgcaggacttgtcagcgaagtaataatccagccactgaacggcactgcaatggcgtagctgatatgttaacgctaaagcaactcactcgtttcggtcatctcgtcgccctcgtatgaccttgtcctgaacgagagcctgaccacggccgttttcttcttctgctgctgctggtgcgggctggcaccagcgatcggcatcggctggaccttgttgctcggaatcgacgccgggaacggccgcggcgacattgcggcctaagatacttacagtgt

SEQ ID NO: 8294 - DNA, 1130 bp, Zea mays
cttgcatgcctgcaggtgtttgaacaaattcctgggaccctcctaatcaaaggttcattattgaataaagcattatcaggtagtcccatggtctttatgtgactattggcacattacatgatcatactggaacacctttgtcagattgctttaagatatgacatgcatttatgctcttagtcatcaaatagtttcatgtgtaagtgtaagtgtacatctatcaaatccacctcacacagcatggtgcctccatgtcgagttgtttgtccttcccatgtactgtatagaacagttgaatctaatgaattatctactatgcattcatgacacatgagatatgaaatccattcttggtaatgctattaataactcttgggtgtcaaggatggtgatggtgacatccttttgtattagtttgtcggtgctattactacgccatgtgccccttactataatgaaatctgttcatcgagactgaaagttcgatgcacaaataaactccaaatctacaggctggcatatgtaactactgtagcatgcctagtccacctttgccaagctgtgctgggccaatagtgatgaaatggtccttaagggtagttgtctatcaagtaaagagggagtggtggtggtactggtgtctggctggctcttgtatatggcttgacaggcttgccaccggctctagacagatgctagtggctaatctcacgacggagacataaatgacagtaagggaccatttctagattggctgttggtctgtaggaggcagagcctgtacatccggatcatatgacatgttggttttaaagttttctgttgccggctgtcttggttgtggaggatgcaactgttcaggcaaactaacaaatcaagccaaaagttaccaagaatctcctggctaattctttcgcatttgtttcatgaagctgaaaccactacaaagtgtgctgttcatgcgtactactgccatcccaatggattgcttaagaaccatgggcaacgttagaagttctgagcctaacattactatgatgtgtcagatatgttgtttgatgtccctcttgcttattattgaagtacgtgtcttggtgacaaggacactcattttcctgtctttttttttt

SEQ ID NO: 8295 - DNA, 1137 bp, Zea mays
agcttgcatgcctgcagccactttcaaacaagaaagaaaatgatgaagttttcattaagctggttagtttccctgtaattaatgctttgataccttaagtttgctgagctttgcacgggttcttcgatgttcttttgttctcttagggttctgacaaggataagaagaaggaaaatgctgagcgtgatgagcgtgccaagaaggtatgcattgtagttgcaaatcaaagtagtttctgacatatggttgcactgcaattgcatgtggggatggtgtgtggattgtgcatgtgctagagattccgttttacagctcttcagcttaacactttcttattgaatgcttgaatcagagtggatgtagccgtagtacatctcttcagcttaacactttcttccgcttatcaatcttttttagtaacagggactgtaatcttataaatcttaattagatctgaaattgtaagcgtgtgatttgagagttgagaccaagtattccgaatcttcaaccttgatacacaaactctgaacaaggggaaaaagcaaggggcagtcttaatgacccatatgatctgtgtcagttccatgatgtttttgattcttatgttatgtttttgtggttaatgcttagttgagaaaaaaaactgggtgctgatgtgataattatcgtaatcttggggtgcagtcggtgagcatcaacgagttcctgaaacctgctgaaggagaaaggtactacggcggccgtggccgtggaaggggccgtggggatcgtggtggttttagaggcggatacggagggggatacagtcgtggcccagctgctgctgctccatccattgaagatcaagctcagttcccaagccttggtgggaagtgaagggcgcccagctgctgctgtcaccgagcgttgtgttgtctgctgttgtcatatttaaattttgtccgacgttaaatttctgtgccacggtttaaacggaacaaataatgatgttgcatgtggctatctttagttatgtggtacttgacgttgaataccggagttgttgtttatcagaattaacctccaatttttgtaggccagcttttaccattttgttgtcttagcatgcttgcttgtttggctgtcctgtatggcact

SEQ ID NO: 8296 - DNA, 596 bp, Zea mays
tcttgcatgcctgcagtgttctggatctaaaggtgtttggttggactttataaaatgttgttttgaatactacagtatagctaaaactgtactgttttttgcagagttttctaaaccacggtattatggtcacgtacaagtgtagaccatggtattataaaacgaccatggtattctaaaaccttagtttctaaaagcatcattagcaaacagggccgtagtagtatataactcgaacctaccaacagtagatcgcgtactagatgcgagagagcaccttcgtatatatacctgaagaggccggaacatgtgctgctcgaccaacctacccaatccatgtatatattcctccacggatcgattcgaacaataataatggtatggctagatgctcacggttcacagatgaatgacccggatgaaagactgaggtgtgtatataactgctgtgcgaccaattatatgctagtatcgtgaaagtattatccatgtgccaaatccaggtgtcttttttctaagaggaccaaagttaaaactgtcagtctctgtattaacaaaaacatgacaaagctaccaatgtcttctgcaaccatatt

SEQ ID NO: 8297 - DNA, 1177 bp, Zea mays
agtcacctgcagtctcgcgatctgcctctgctccttccttcctctcgacactctgctgctgcgggcctgcggctggccgacctgatgagcgcagggagatgaggtgcaagctccacccttacgccaacgccgtgggcgtctgcgcggcctgcctccgcgaccgcctcctcgcgctggccgccgagcgcgcccaggccgccgccgaggccagcagcgacgggggctacgggagcagcagcagctcgcccccgcccctacacctgcccgcgcggcgccaccgccagcacggccacgacgaggcaagaaccgggacgttcccgcgctccgtgtcgccgtacgtgcagcgccggcgctccgacgcctgcgcctactacgcgacctcctcctcgtcgtcgtcgtcgtccgcgtaccagcaccagccgagcctcctcttcttccgcacgccgcaggtcgggcccgcgttccgcggcgacgagcccggggacggggaggacaccggcggcggcagcaggaggaagctggccgcgccgcggcggtcctttctgtcagcgatcttcggcggcaggctgcggcggcggcacgggcgggaacgggaagaggccggcaggaacaggaaggagcctccccggcggtccacctcgtggctctcggcgatcatccgccgcaagcggaggccgggcgaggagcctgagtccttcccggcgccgcaggacgaggagcctgagtcccccggcggcggcagctggtggttcccctcgccgtcgcccgccagacagcagcaccggcggcggcacggcgcgggctcgggcgccagcggggacggagtctcggggctcgccgtgtgcctgagcccgctcgtccggcccagctccgccggcggccggcgccggtgccagcctccggacccctccgcgctgggagacagccaccggcggctcgcgtcgttcgggcgcaacgcctcccggaagctcgctgatatgggtcggctccgatgacgcggcctcgccgaccggtcctcgtcgtcgtcggcgtgccggggccaaagatctctttattttgtgtaatttcgaagatgctatgacggtgttcgttactagtacagtagtagtagtagcgcttagcgcctagctagccgccacgagagcggaaacaaaatggcagctgcaggcacgcaagg

SEQ ID NO: 8298 - DNA, 1166 bp, Zea mays
agcttgcatgcctgcagaattttttgtaacgatattttttttctttcttatataatcaatttttctggataataagatatttttgcatttccatcttcatcttctaactctgatataatttctagttcctgaggtgcagggaagcttggctttctggaattcttgaagatctggaccaaaggaatgtttatgattacctcaaaggcatggtgacttgccacagggtacatctattcgatgttgttaatcaatatagagcaatattcaacaatgataaatctggaaatgatgagaactccgaaggtgggctgcttttcagctgggcaatgcaacaagttagtaatcacctcgctactcttcaagttatgttaccaagcataacagaaggtgggtctctgtccaacattcttgaacaatgcatggtaagaatagcatctgaccctttttctatgtcgattaaggtttgatacaatatttatgagcgatatctggtttcattcataaattcgatacactttcatgttgcagtattgtgcaatgggccttggcttagttggattggatttccgtggcctccttccgccaatctttgaggagtaattggtgtttaaattattgaattttatcaccgactctaaaggggctttgttattgatgctgttatctgcattttgcagcgcggttctaaatttattctcaaagaatatgagtatggcggttgaaaattttcaggtaacacagtgttttgcgacgattatgcatggtgaaatactgttaattctagatcaactataatctggattcactgtgctatttgagcttttgaccaactttctagttctttggatacagcgtcttattagtataccatcttactgacattgtaatacctttgaccatgctaggttgttttggattcgcaccgctgggttccgatgccatctgttggctttgtagcaaatggtgttgtcgatgacacttctgatgatgtgactccaccttctgttttaatggagcatccacctcttgcagtgtttgttaacggtaagttctactacatcacttgtggtatttgcttttgtcactactcgaacatatcttgtggataactggtgtgtcccaattgatgtgttatgtttcgaaactcttgtctgcaggcatgcaag

SEQ ID NO: 8299 - DNA, 1152 bp, Zea mays
  unsure (1)..(1152): unsure at all n locations
aattaggaggagacgttgtcaaatgtatcagagaaacatgcacttaaaaattgctcaaagcatgaagttctcaccattgcaattcaaacaattagtgtggctccttttaactactggatcaattgaggaacgaatcgttttttccagagcctccaagggagatctgtcagatgcacgtagcacgtcacgcaaactattgccgttccctaagtaaatgtaatcggcagggtgttttttggtgcttccagcatgttgttcaaagtaataagatgaaacagcctgtaaaatgaaaaggagagcaccataaataaacagtttttgttctttgacagtttatagactacggaaaacataccttggagccattacaggacaggcaaaagcaacgtatattgcaaccagtaatcactccttttagcacagccttctgcaacttgcaagcataaatttatgttaacaattgcatgaggatacaaagaccagacagacaacaatcaaaagcaatatgtcatcaaagcaactttagtccatgatggcagctgcacttgttgtcatggatcatggttcaaggtctgtcaaatacccatgctgtctcaacaaaagatagctctatcctaatattagtatattactagactatgttaaaccagtaaaaaaagtgtaaaacatgaatttgcaagccattagcacaccagtaaccacagatttaanaactgctcatgaaacattacggctgattctcacanaccttgctatgaggaatgatgtacataactggcatcccctcaagcatgcctgtgttgagcagctctctaatgtttccagggtgcttcgtgaggcaggcaactttctttgacatcttcatctccatcttcttcactgatggaggggaatcagatgcactgtccagcgcatcatcagatccaaccaaactgctctcaacctttgtcttgagcaacgaccttgtgaaccttctctgaggcttctccaggagcaaagcaaaaccaactgaggcatccttgctaccatctggtgttgcctgactttcacaagatgcagactcttctttatctggtttattattcttgagcaacgatcgagtgaagcgccttgcaggcttgagcccgacagcagctgcaggcatgcaagatg

SEQ ID NO: 8300 - DNA, 1085 bp, Zea mays
aaaagaaccaaggcgttccactgtaagaaaagaacaagaaggctttccaaaagggaccgtagcaacgcttcggtgttccaccactgtagtaaaagaatgaaacagcttgcgacatttttgcaattttactatccctgttagcctctcagcctggatgaaaacatttaagaacaaaccaatcaacgttgtgattacatgcttcgtggggatgatggcaatgctccagcatgcatggaatgaagtatgccatattgacatgccatgtctacaaaatttcctcgtcaaaatgccatgacatgatggaatgaatcatccaagatttcagaattgttagtaaaccagcgaaaccacatcaactattataatgaaaacacaacgttgcaactgcacaaagggaaatacataatacgaatactacaaagtgtaatgtccatgacaaacgccaaatgcacatctagaagactaggatggccttcacaagctacaaagataatgtaaaaaaaagtaacaccagcatgttttggtgacaatgcaatgtcagccagatgatgatcatgcccctgaaactccacctaataaagatgatagatgatgatcatgtcccagatactccaccaaatgaagatgatgatgccacgtgagagagcgtgcattcagcagaagtatgcagatcataaataagatgtggtagtatgaaatccatgatggcatgctaaagttcaagatacatcccctcaggctgcaatcaatttgcaggagccccatttagaacgctcgcaaggccagcagctgaatccttccttcgcccaaagggattctttgaaaatgtgcaggatgttaaggagtgccaaaatttgatacaaaccaaattagaatcaagatggaagtgtgtatctaagatataaaaacatgtaggcatgtaataggtatatgggtgtgttgttattatgaaaagagtatttaatttaaaattgaagatataggtctgatgcaatgtaagaatccatttttttcgaaataaataaaggatatgaatcgcatccacccgaccagaactaggaataacagcaccctgcaggcatgca

SEQ ID NO: 8301 - DNA, 1194 bp, Zea mays
agggatatcacaccaaaggcagcaaccatggtccagctcttctcaacaaacccgaaaatgttgaagtagcacatgaacctggtttcatatacacataccacaacacatttatagcagtttcagttcaggttacagcaatagtgttggatagaaataggtataacagatagtctgtttacgtacagtactgatgcgatgaaacctgccaagaacattgcgatgctcccggcatatgatttttcagggttgtgagggagcttaacatgcccgaatcgtctcccagctatgtcagcaacacctgaaaggaaacagtgtgctgggttcaggtttcacgtgaacaaacaaagagagattgtggctagagaacaggcattcaggcacagattgtagttgcgatcgaagaaagaagcaagttaataccgtctccggcacacaaattgcagatcaccgcgattgagatgggagatgtcctccagaaaactattgttgtcagagttatagcacaggcataatacagcgggcccttgagaagttctctggagtcaagaggcaaaagcatggaatcgtcagttcatcagagttggcagaaaaaaagagatggtattttttttcagagcactgccttggcacgttttgtttaagaggagaaagaaacaaatggggaaaaatcccatcagtaaacctacgtttagcaaaatccagctacaaaggtcaagtatccgctattacacaatccaatcggcgacatatggcagctacacaatcctaatgggcacagcaaaagtatatgcataatagcaaaaccacagcctcctccgcaatgcattcaagcggcatggtagcaacaaatatacgatcactacaaaacatacctgcggtctccatgcctagtcatggagttaaccacaccttcagctttcacgaaaccaagtccaatcactgtcactttcatgatgttgatgatgatgataagcggagcgagagatggagcaaacacatcatctgagctgaaaacgaaatgagcaaggaaaggaactatttgtatgcagtcaggttgatacgctacgactggaggaggaggaatttttgtctttgctggtggcctaatttttactttacctgaacaaaggccacataaggaaaaacactaatcctacagttatgtgcaccagtttcctgcaggcatgcaagatg

SEQ ID NO: 8302 - DNA, 1167 bp, Zea mays
cttgcatgcctgcagtccctaagaagtttcagaccattcggactgttcaacaggccctcccttcctccacttgggtgcaggatatcaaggggaatctctcttgctggtctagaggaattcttacagctttgggacttgttagaagactttaaattgcatgataggccccgacaggcatgtgtggaggttctctaactctgggatgttttcctcaaagtctgcgtacagagtctttttcactggtgttgtttcctttgagccgtggaaagggatctggaggagctgggctgcgcctaagtgtaagactttcatttggcttgctatgaacaagtgttggacagctgacagactaaaaaagagagggcttgtcttccctgtgagctgtgtcctttgtgatcaagatgatgaaacagtgcaacatattctctctaattgtgtttttgcaagacaattctggcactctaccatctcccttattggccttgctgctgttgttcccaaatatagcgatgtttgctttgatgactggtggagagaggcctcctccaaaatcgtcaaggggaaaagtaagggatttaacagtttagttatccttggtgcttggagtctttggaaacatagaatcagatgtgtctttgatggggctcgcccttccatgaacactctagtggatgggttcaaggaggagctacaccttggcaggtgcaaaaaatatgcaaccctttttgatcccggttgaaggagggggtctcgaggggccggtgtgttcaggtggttgtaagcggcctgggtgtgccttgtgtatgtgtgtgttagagagagtgtgttttgggtgtgtttcttgttttcttgtctgggctctagcccttctttcttctcctattaatataatgatacgcagctctcctgtgtatttgagaaaaaaaacttacttgaaatcacatgcctagcaattcctagccattaatataaactcatgcatgtggcaatcatctaatttgatatgtagtcatcaagagcaagtggttagcaaatctagcctcatgtatacaaggattttgcttaatgcaatatcccaaagatatatatagcagtattcttgtagccaagtaatttcaagtgcaaataaaaaggctcagcaagtctgttatactgcaggcatgcaag

SEQ ID NO: 8303 - DNA, 1054 bp, Zea mays
agttggctagcagcattgcgaacgggctacaggatcatgtttagggatgaaaacggtttcgaaatttttcggaattccggaaaccgatttcgaaatttttcgatcggattcatcggtaacggtatttttcgaaaacggaatcggttttcggaattttctatcggaatcggtatcggaatcggcgtggtgttttaccgaccgtttccatcggttaccggtttttgtcggaaattaccggatttatgtctcggaaatttccagaattgtgtctcggaatttttttcggaattttccagcatgtgattttttcgcatcgcctgtacatctctggataagtattacttatttttgtattttttggacgctttaagatttttttggggttagatggtattggaagacagttgagattaacgatttggtctctcgaacgaatccaccattttctatgcacatgttatgtattagtaatatataatgatagatagccgacagtctgtcttttccacacactagattttagagttttcctgtgaggctgtgaaaaccctttatgtgaggaaaaaatatttcatgagtaagcatgctatgtcaactaaatcgagtggatattgtgaaatttgagtctgtgaacttgtcatctttatgaacttgttatactgtgaacttgtgatctttataaactttttatattataaatttgtgatccttgtgaacttgttatatcatgaattgtgaacttgtagtatttgtgatcttttgtcaattttgttttattgtgaagtttgatatgtttaccgatcgtattttagatttcgaccgttaccggtgtattttccgcaccgaactttcgtttccgatgtttctgaaataccgatatcgtttccgtttccggagttaccgtttttgattttgtttccgataaaaatatgaaaacggtaatggttttagtttttaccgactgtttccgaccgttttcatccctactgacgggctgctgggaactggagggtaagagatgcagctgcacacacagcaactgcaggcatgcaag

SEQ ID NO: 8304 - DNA, 1200 bp, Zea mays
tttgcatgcctgcagaccactctaaagtttcaagacatgctatgcaacaccttattcgaagatactacagaattagagtgattcataagacaatcagttacgagtaccttcagcatccacctctgggttgtctgggtgtgttttataactgccttcaagactcatagctggactcctgctcagatggctagtagctgaggaaggtccaaaatttccagatgatttagcatcgaggtgttctgagaaacttgctgtggtgttctccatagcaaccgcaatgacgtcaggcctcttcccactatacttccgtaccattttcctcaagatttcagctaccatcctctccatgtgactaagtggacaattcacaggacagcttgacaatgcagcatgagctgctttgtagagtgcgtccaacaatcttccattatcaagccatagacatcttgttgtaatcttaaattttcctttcaaaccagactgcgctaaaccatgttccttctgaggtcggaagatctccatgctgcaaaggagtaacatgtaaaatgtttaggtgcaccgaacaatttcacatgcgaggagaaatttttgctgtattatggcaatgcaaaatatatggtttaccatatatggtttaccattttgactatcacaaggttcgacataaatcactatcatttcacatgcgaggagaaatttttgctgaagataaacctagaaaatactctaaaactgtacaagaaactacctgacaaaaataatgccatcagatgcgattcttagtctctcatcaatgcagagatcagtggatgtaccaaaagccttatcaccatcactatacatgagctgtaatatcatatatcatgttagatatcataactgcaaaagacagaaaaaacgacggtgtaaaataaatggttcacctaaagatcctccttccctaatgaaacaaacccattggacaaaactcttctgtttcttagatgcgatacaccaagcatttctccattttttattacctgcaattatagtagcaatctaagaaccctaccaatgctaacaaatatgagctttgatgtattatggcaatgcaaataatacttggattcaaaaaagatacagatcaaacaaggttctttgtgaatactacactgctactatagtcctacatttcttactgcttgttgaaattcaataccc

SEQ ID NO: 8305 - DNA, 1555 bp, Zea mays
cgacctgcagcgcgctcgagtgcgcggtgtgcctcagcgagttcgaggacgaggagcgcctcaggctcttgcccaggtgcagccacgcattccacccggactgcatcggcgagtggctcgccagccacgtgacctgccccgtctgccgccgcaacctcgacccttacaaggataccagcagcgacgaagaccccgctagcttcgtcccgccgattccagtggccagcagcatctccagcgaggctactgcggtgttagggcagggacgaccgctaccggtcgccgtggtgatcgatgtcatcacccagcaggaggaagaggcgcggaggcaggaggcactggagctccagcagatagggacccagcggcggtcgcggtcggggcgcaagccggttccgacgcagctcgcccggtcgcactctacgggccactccctcgccgtccggctggaccgcgacctggagcgcttcacgctgcggctgccggagcacgtgcgtagggagatggtcgccgccgcgggcgagcacagccacagcatgcagttgcgtcgcgggcgaagagccggggaaggaagcagccgcggcggacgaagcgccccgctcggccggacgcccagatggcagtcgcttctcgcgaggacgctctccgggaagctgtccttcttttcggcgtccagggtaacggtaagctccgaactgggagaagtgtcgtcctggtcctcgatcacgagggcgagagggaaccgcgtggccgccgttgaagccgacgacgttcctgctaaggggatcggcggcgggtctggcgctgcgtcccgcgaggtggcggcagcggcggacgaggagaagaagaagaaggcagctacgcagcaggttcgcacgtagaatgggaacaacagatttcaacgtagaaacttgaaagtggtcttctttcacacgcgaaagaaatgggcttttggggtctgtgggcaacagatttcgtgcttggatcaacgtgccactcttgtccaaatttgattgaagttgagaacacgagatgtacaaatgctatttataattttgcgcgggagcagaaacgtagtacgcaggtagagattcgttttgactttaatccgtatcggattctactgtttctacagcgttttatatctattagattctattgtttctacagtgtttactttgtagccctgatcctttctgttggtatgcattttataccaaatttgtcatgcgttttgcttcagaattagggttctgctgcgcgcgaattgatatcgccgtcatgtttactacgttttcaacactagcatggagcgaattctatttggagtgaattcacatgctccacctgaaaacgtacacgattgatgatcaaagtaatagatgatactactactaagtttatcttgctctctataccgtcggaggaaagaactgtcctttgttcaaccagacgtatatgtgtaagcctggatggggatccaaatgttccaacggctgaacaatgcatgtgtaagcgaagaaaggccacaagcatcgtacgtcacgtactcaaa

SEQ ID NO: 8306 - DNA, 1088 bp, Zea mays
gcgaatgttggacgcttcggattgctgaagcgctgttattaaaggaggaattccttcctcggggattagaaaacttttccccccctgaaatccaactggagcctcagattttatgcatcttatatttaatgacgatgagataaatggtacaaggacactaacacgtgtgaggctccactgaataaccagatggaaatctggaaacatcaacaaaatggaactgactaaatcaacataaccagataattaaaacatctgaagtacataattttttgttgaattctatggcatatcagtgtatctctgtcggaaaataatgcagtaaaatgagtatttactgttcctcatcttttgtttttctctgtaccatgattttacaggcacaaggactgtgcacacagctggttcctactttggctctttgtggcatactggtatagaaattgctataattgaaattcctgcaatcatgtaaatttaaatgtaaacttgtttgcgtatgccatgactataagctaaatttgctatcagtctcttgaaatctgattgagatcaacccaatacagtttgaaatgggcgctttccgacaatggtaccactgaacttttggagaatttattacattgtaatcctgcttcctaaaacaggtatactatgcggcgtactcagttggaatgggcccagttccttgggttatcatgtcagaggtaagaaagtatcctgtgaagttacttttaagtgatgatcatttgtttcaggatatctcgtgacttattgccacagatattctcaatcgacatgaaagcaatcgccggagggtttgtaaccctggccagttggattggttcctttgcgatttcatactcattcaacttcctcatggattggaaccccgcaggtaaagttcttcaccattgctagaattggagagtgaggcgagcaataggacagttatttgctgttcaagggccagttgactgataacagacgtttcgaaaggaaacttttagtatatctgataatttagcctcataagtatctgattcgaagctgtctgcttctgtatgcaggcacattctttctgttct

SEQ ID NO: 8307 - DNA, 1091 bp, Zea mays
tgcatgcctgcagatatattatctaatacatatatacatgtttagtccttaaacctgccactttctggcaattggtcatggtctatctgggcattgaagtactgaatcaaggagaataactatgaacagtcaaaaaaaaaacatgttcacaggttagagagaatccaccaaagcatatactaaaaagtgaagaatattaattgcatgagcttaagaaaatactacttcagatgagaagtataccatttttccaacacctggtgatcccacaaatattattttgtctactgatgatacaagagcttggcctgtttccgcaaaactaaaaaccaacaaaaaacagagtccgggtaagaaatgtgcagctagcctgtaaactaataagaatttagaaagctgcactcatacccagttattatgtgcaccagattctcaggtgcaccaacagctgaaagagctgcttgtataatacgaaaataaaagcagcccgaccaagtcgcatgttctgagacctataaaaggtaattttaccattcagaataatcatgaatgatgtataatgcacatcagaaaaattagatattttagaggccacaaaaatgtctatgagcagcacaaaggcatatataacatataaatacatttaacttagaaaaacaagaaaataagttaatgacacaattgtatgcagtattgccatgctacattctttctcggacaatgcaggaggaagggagagaattctactagcattcggtataaataaaaaatcaatccaataaaagctcagtagaaaattgttctgcatttatttgacaagggtgctttctatgagccaacatatgctcaatatgaaatttactagtctcttgaagatcatactaggttaacccaacaaaagtataattgaagataggatacagaacataaattatagctctcagcttcaatggtggcacataatacatgagatataaagattgctgaataacaaaaaaattgatctatgggtccacgtctccacgatatgtacatgaaaatggttggttaaagaacaaatttaaaaaaaaatgacctgcaggcatgcaaga

SEQ ID NO: 8308 - DNA, 1196 bp, Zea mays
tcttgcatgcctgcaggttagtttggttttgacatgctgtactctatctgttggtacacaagagcaattagctccttgtcttgtactgatgagtgatgacacggtaaaccattgatgtataccaggattttggagcacagcaatttgtgagggccctgcctcagtgccaacacatattccacgtgcggtgcatcgacaattggctccttcggcacgcatcctgcccactatgccgggccggcgttcatattgaccatatacatatgtaaataaactcgcagggtggcacctggtgtattttcatagtgaatacccgtgctcctgttggatatcacaagtatagctggctgtatacataggttttctcctttttttttgttacttctccggtcttatgtggggctatgctttcagctgcacgtttttgtcgaagtaatacctggattggctggatatgtacatcttgagaacggattgactaacaagctccctgaattatggtcctgtgtgcttcaaaaactgtctaactttcaaaaagaaaactgtgtgtcactgctggtgttaactgctgatgctgacacgctaatgcaattgtttgctactaggcaactaatggcaggaccattggagcataaccttgcaattgaaggttggatggtggaaattgaaatgctgaacgttttgctttttgttcagatagcaggggtttccaatcaccacctggtaccactgattttcagatgtcgaaattttatgagaaatcgaagagggagcaaaagcttcgccctcaagtatgatttgggaaagacggtgactggtggtcctgtcacgttcgatggctagtcacagcatggagccatggacgaaatggttacccaagcagtgtgccatacaccaaatggaagctcttgtcacgctctctctatcgtagagataggcttgttgcagaagaagggaggatgcgatatgagcctgagactgatgggtacaagatagctactacattgctaccaccattaactaacttttaataaacactttagtactgagtgtcctttacgggaaaaaaattctatgcatccgggatgtatagccatctatttgcagcccctcacattcatcacctatagacccacataaacagaaaaaaaaattaccaagcagtcaagtggtagacttcgatttctgtttatatg

SEQ ID NO: 8309 - DNA, 1090 bp, Zea mays
ttgctgcccgacgaggacctcttcatggccggcgtgcctgatgtcgctgcgctggtcgttgttttatcatggctcgtggatggtggcgtgcctggtgtagtgtcattgcctttgtcagcagcgccagcggggtgggagtgggacttggagtcttctgcactcgtggggtggctgctctccgtgttgttaagctgggagaggctactggccctgtgcctgaaccactcgtcctcctcaccttctgacaggctcagctgtagaaaaaacagcaaaccaaaagatattcttgtttcagagagaagaaaaaaaaggagcaacgcagtaggtttttcttcctgggctaggatgcatgggtatgtgtgtagaagtgtagcactctgatcgatttgcttcttcaccttgacatttgtaagatccacgttcctgttcttcagatagttcatgaactcacgaaagtttgcctccgtggggcggtagtgcccactatgtggccagacagcctgaaagatgctgaacgaatcagacaggtgacttgggcgctgcacaagtaaaaaactatacgaggctggaagacaagtgttgatctatatatgcacctttagaattccatcctctacaatcagtctgccagcagcagatgtggctccaccggcgaggaagctggagtgctgaaatgtgcccttgctcttctgcaacaacaatgagattattacatttcatctgttagaggctatcttcatggttcaggttcttctctactgcctgcttaaggtttcaaggtgatgtggtggttgcctggttggacgtaccgtaccgatgtatagagctctcgttgtgctcagcacgaagatccattttgcatccctggggccttcagatgtgtcgacgattttctggctcagtttgtacataaactttccatcctcaaccacgacctcataggactccctttctttctgcacaaattagcaaatcatctacggttcagatatgaagccttttctgctagctctgagatttcgtattcattgctgctgagggttgaagcactaaccgggccaaggtacctgatgcattgctgcaggcgttc

SEQ ID NO: 8310 - DNA, 1171 bp, Zea mays
taccaagtaccaacccacccacgcaccggcacgtactcccacaccacacccaaaacgccgctggcgctgatccgcgcgctaggcccgtaggttcaacgcgacggacttcctgcataggctgcgcggcaagcggctgctgctcgtgggcgactcgatgaaccggaaccagttcgagtccatgctctgcgtcctgcgcgaggccctgccggacaaggccaggatgttcgagacgcacgggtacaggatcagcaagggccgaggctacttcgtcttcaagttcccggtaatgcttaaatcagtcggtcgatgagtgttgtgtgtggcagcctacaatggaggtggaagtggaagatgatgatgatgatctcgtccagtgtgtgtgtgtgtgtttgttgacgaacggacgtataggactacggctgcaccgtggagttcgtgcggtcgcatttcctggtccgcgaaggggtgcgcttcaacaggcgggggaactccaacccgatcctccagatcgaccgcatcgacaagacggcgaaccggtggaagaaggccgacgtgctcgtcttcaacaccggccactggtggacgcacggcaagacggccagagggtacggccatgttctgtcttgcaagctcatacttactctactcctgaacggtgtgcactgtgcacagacagaactactacaaggaaggcggcacgctgtacgctcgattcgactcgactgaagcttacaggagagccctcaagacatgggctcgctgggtcgacaagaacatggacccggcgagaagcgtcgtcttctaccggggatactccactgcgcatttcaggtgacgacggtcgaggtcgagcgatcaacagtacgtagcagaagctgtcgcctgtggcgggcgggacaggagtttcacgtacatgacccttctgctggtgcaggggaggcgactgggactccggcggctcgtgcaacggcgagacggacccggcgttcagaggcgccatcgtcgacagctaccctctgaagatgaggatcgtgcaggaggccatcgcccggatgcggttcccggtgcggctgctgaacgtcaccaagctgaccaacttccgtaaggacggccacccgtcggtgtacggcagggccggggacaagaagctgtccaggaggaagcaggactg

SEQ ID NO: 8311 - DNA, 1106 bp, Zea mays
atattggttcacatatgtctcgcttgaacttctgtaatcttgttcatgttatttatggtcttgtgtcgtaagagattatgatgatttgaaattgactggtggcttgagccttgtctttatcacaaccttttcacagtctggttacattctaaaaattgacaatgagcctactggcttaatcattttctgaaggttggcaaaaatggtcttcctcagatgcgttcattttctggctgtccatttatagaatgaactgtagttctatcccagttgccacagtgagcctgctcctatggatgaatttgttgaagtaaatatacttagaaagtggcagacaatatttgttgagatgaatatatctgtaacaagttggccctttgctacgttggatgtattatataagaacactacctgcaagcagcttgaattatagttcaatttggctcacaccatgtttgattattttagtttcatcgcatatttttatgataacatgttcatgttttattgcagcttgccccaactcgaggtggacgaggtggacgattcgaggttatttttgtttccccaactggtgaggaaattaaaagcaagagacagctgactcagtacctgaaagctcatcctggaggccctgcatcttcagagtttgattggggaaccagtatgcatctagttccattatttcttgaccacttcttagttgtattgtaaattcatctgtttttgtactagtaggtttcccaatattcaatgtcttgttgctccctctaaaaagtttgtaagcaggtgatactcccagacgctcagcacgtttaagcgagaaggtcaaggcaactgagagcccagagggtgagaagactcctaaacgggcaagatcaagctctaagaggggcaaaaaggaggaaaaagtggatgcagaggatgcaaatgaggctggagaagatggtgctgcggcggaaggtaaaggtaccgatgtggagatgaaagatgctgaaaatgctgaagacgagaagaaagatgtcccaagtgcagagaagactgaggaagttgacgataagaaagatgctgaaaatgtggagatgaaagatgctgcaggcagcaag

SEQ ID NO: 8312 - DNA, 1227 bp, Zea mays
tgctatacattagagctgacctgcagatgttacgggctcaacttccaacgctgagcttctcttgaacctactgcacatcgtcaacgaccacctatcagcccattccaagcatcaagcaggggcttccacctgagctcctcccacgcgctgcgcctcgcctcggcctgcgcctccgtctccgcctcgcggcctgcgtcccctgcaaccaaagtttctgaagctcatttgcacgaaccaagtggagtggagagaaaaatattttcgttcactttaccgtcgaggcccccggagggctgatcccgttccagctcctcccgctgcttctccctctccagtctcctggcgaagttcttcgccgccgcaaacacgttcccgggccgctcccacccgccgccgaatacgccgtggccttccttcggctgcggccgggacaggaactccagcacgggcaggtcgtggctctcgacccagtggatgcagtccacggggcaggactccacagccagctgcccttgcacaaacaacatacagcagttcaactaatcagcagagaactaggtgatttttttttctacgctgtcagagtcgggtcaggaaacgaaaacgacctgaatctgctgctccaggtcgccgaactggacctccacgtgcgcgctgccgagaacgtcgtccatggcgaacgtcctagcggcatggtgcacgcactcccggcatcctatgcacttgttctcgtccacgaagagagcttggcttctcacgggcccttcccaagaactgtatccgtccccggtgtaaccggctcctgaccccaccctactcctgccccttccatcggcgtgcctggaactggaaacatcccgcatcagaaccttgtacgcctcgttcagcagcagcgtgtagtcgtggccctgcacattcagatcccaaaacattctgttttttagcttcagaaaatcgaacagatttgatattagaagctgcccaaataaaaccagcagctgctgttttcctgggcacgcacaccccaactatgaatggaaggaggagggatgagcggaagaataggagagcaaatggtaggcatgggtgcaccttgtagccggcgatgtctggatggtgttgcttctggagtttcctgtaagcctccttgatctgctgaggtgtggattgaattgcgatgcccagcacctggtagtaatagtccctggtccttccccttgccgtgct

SEQ ID NO: 8313 - DNA, 1181 bp, Zea mays
aagataaatagattgctcggcatgaaacctagatgacttactcctcatattttttcttgaaatgtgtgacagacattgcttccaagtaagtatcagcaactaatcctgcacgcattgctctaaacccatagtaaggcatagggagaaaaattcctgacatctcaaccacatctccaggtgcaacctgctcatgatagcatttagtacttggttatattacataatatctttagtgagttcttaattttcaagagagcatttagctagtgaattgaataaaccaaaaacataaatctaaaagcagcttgcttctgaagctaagtgtagagcacattgatagaaatagcgataacagaagagtaaaggctattgttgcgcaaagcaacccaaaaaaactgctcaagtttcagtaaagctactattttgttttacctttctagtcagctctcctcttagatgaacagtcagagaacgaggaatgtggcccttgggtacatgctctgctaactcttgaagcttcacctgcaagacaatgtagttgttatatggaagtggaatccaaaatatgatgaaattttggctgctatggaaaaagatagccctgcttgaccagattgtcaagaaaggttaatacctcctgaaatttcaaaaacttcgatgcacgcaattgaaggattagattcccctttgctttgttcagcttgcatcgttgagatggacattcaatgaggggcataaacactctagcagtcacttcctgccaaattcaaaacaaaaagtttcattcaaaatagaacttagaccagatacaaaattctaggtatgtagctgactatagacagaagtgtctttcagtaagatcatttatcatacggtgtcaaatatagaaaccaaatcactaaggaagcctaaaatgagatcaagtacctggtatatctcaaagccacattcttcacatgtataaacagcaacctgcatcaagggcttcacatccgagcagcgagtaacaatcccagatattttcacaagctgcccaatgttggatgcctttacttgtctaatggtgagtggagttgcctttgagaatgtcttgatgtaaacctcactacagtaccaaaacaaaatcattttttagacaaacatcaacagagctcgataaatggatatacagggaaattatt

SEQ ID NO: 8314 - DNA, 1208 bp, Zea mays
aatcggagggaccaccgtaccatgataaccaccataggatccactgtatggtacattattagcaacttgtgctggccttgaagcagcaggtgatcccagcaaaccagggccactggaatacgttccagtattagcttgagcagcattggccggtatgttggtgccctgctcattaggttggtttctcatttcatagggcctggggtttccaattatggcacactcactttgcagaacatcaagtttgataacgataatgatcctgaacaaaagataaaggcacggtcaacccaactgataagaggcaagccaaaaaaaggggcaacaaactaagattcaaatatgatattcttcactttaggagatgcctagtcaggtctaacagaaacaggtatttctaatcattgcctccatgtcacatggaaccaaagaagttggggaaacaacatttctaaagaaacattcatgaagcatcagtaacccacttcagatcttaaagttcagcatatcagtggatttacattctattgatatatggtaatacattataattccatgattatccatactttaacaacaccaacaagaatattacaaggttcagaaggagctactcatttgaatggtcacaacagaatgtgtggtgagagtttcactgattttacatggatgccagaataagatatttcctacttgtaagtactggcacaaaactacgttaatctttcactgcgctaagaatcaacaaccatatacagaggttattaaaagaaactatgcatgttaaccattgcctgtttgacagttttctttctttcatggaaaaccgctaacagcgaagggaaaataacatcaatgtgcattgtcggatcaaagggagaaagagaaaaaaaacgcatgcggagaagggcaacatccataagagaaacaagaatagaactggctggactccacttaaccattaacctagtccgaggctaatctgaagatagaagaaaacggtcaacaagacttccgtgtgtctggactctggactggaacggccataaaccctagtaccgcatcgcgcccaaataccattttctgctaccaccgaatcccagtctatcttttcacaaggcggtagccgcaaatcccctacgggaatgcccgcgaagttcgcacccccaacgctagcgcgcacaagcctaacacggtgcaggtcgtct

SEQ ID NO: 8315 - DNA, 783 bp, Zea mays
ctgcggcccctccccgtccccggaggacgaaggtgtggaatgcgtgtcacgccagcgataccccgccgccctttgtctgggactgggagcggacgggaacaaaacagcagtcttcgtcgtttgcggtggaccgtcgacgatacgagggagacgatgcccgcctaggcctgcctagctgtgccctgctgcaccagccggacagaatctgcgatgcttggacgttggaccacgcccacatgcctcgagatccacaccacccctgcaatgacttgaccgccacggggcccctccccgcactgcactggcgccgtgtcacgaattatatattgctgcgactgcgaggcaccgcccacggcgtcagcgtcacccaccagcgtgcacttgccacttgctctcgccagtcgcccactcgcccactgcaaaccgcaaactgtctacgtactatcacgcgcacgacaggtttttacttcctcctcgtccttacaaaactgctgttcttttctcattcttactggagtcggccacttttagttaaacttaaaatacattactaactttaaccgggcttagaattttgtttaacgttaaccggacttacaattgtactacctttttttttcttgacaacgatggtagtactagactaggccacgcgggggtagtacaatgcgtgcagaaaaaagttgtggtattcaaagaacaaggtacccaccacggcttgcccgtggaccttttacccataagaaaggggcgttgccaggggggttaaaatttttcccttgg

SEQ ID NO: 8316 - DNA, 1135 bp, Zea mays
tcgctccggtcagcacccgcggctcctccgagaggagcttcacgaaggtcgtcccggacaccggcgccgagaacgacctcatgaggtttcgcggcgacacgggctcggagtccagctgggtcgtcgtcggggtgttgctcggtccgtatctgaatgaccggacgtcagactccaccgcgcacttcttctcctcctccttgctcctgaccttcccctttctcgacgacggcggcggcacctcgtgcctcgtcggcttgggcctcgttggctcctcgtcgaacgacgtcgaggtggcccttctccggtgggagaacgagaagggcgtctcggcgtccggcgggtccctcctcagcacattcttgagcctgtcggagagctgcctcctcgcgtctcggccgatgtaatccatctgtccctgcccgtcgaacggcacgtcgctgcggtacgagcgcgtggactccgaccgcagcagcgccgggtgcatgtccctcgtgacgttctccctgatctggttggcgatgctccgcgcgatctgcttcgggtcggccggaataacgtcggcggcggctgcggcggcggaccaacggcggtccgccttgtcgtcggaggccaccccgccctcgagctcgatcttgagcctcttcttgacctcctccaggaaggcctccatgttgttctccttcttcaccagctccggcgacccgagcgaggactcctcgacgtcgtccgcgctcagctcggggcagggcttgaggatcacgatcctcgtcggcgacagcgacctctcctcctcgtggtagaacctggagagcggcagcctcgtggagcacgcggcggcgtctgcgctggtcgtcagagagaacgtacggctcccggagatggacgtgccgctctccttgctgcttcttctccaacaatgcacgtcctcgttggaggagcgcatgtgcttgccgccatggctggcatctttccccttgtggtggtggtggtggtggtgctggtacctgtacggcacgatgtccgtgcacctgccgtcgtcatcgtcgtcgccgaggctgctactctccagctcgaagcttctcgagtgctcccacgccctgctcgcctgccacgcctcgaactccttcttgaactt

SEQ ID NO: 8317 - DNA, 1125 bp, Zea mays
aaagcaatagttttgtatcagaacaaggctggcgtgcacaggtactgggccatctgtaacggagcatttgtctagaataaacaaactgttgctgttctctcacgcttctgacagacaagctaagcagttgtggatgaatgcgtggctgggttaactcgtgttgaggcatccatcattttgctgggaactgacacgtccataatcgaactgaaagttctagcaggcatgctttgaagagggctggctgcctagtcgcttggaatgctggtagtaataaatggaactggaaagatggatacagtggctttcacttttttttcagctgtctgcgcacttcaaaattcaaatgcagtgaggaactgagtagtgaggaggctgctggttttgttgcttacctctaccgggagttgttcgaccaggaaattgaagtcctccccccacagagggtttctctggctgggcaccatggaactgcatagacagtgtgagcagcctcacttcgctgatcataatcattcacgagctccgattccgaagaatcagctgtggagggaggcaagtaacaaagcacctgaagcgcttctggtcggcgcaggagatgacggcgaaaggatcggagctgccgtccaagttggcgccgatcaggtacttggccgagagcagctccagctggaagcaccgcagatcacacacacatacgaagaaggctcaaggcgtaaaaaaaacagaagagaggcatgcaggtgcaatccatcagagttgccaaatgccatatggggatgggaaaacatgcatgcatgtggcagtggttaccttgacgacgtagccgccgccgccctgagcgcaagtgatatcatcagaagccgcctcgcccctcgcgcgggtccggcggcggcccgcgactcggtggtaggctgcggttgcagatgaacgcgcggacgaggctggcctgttgccgccggtggccgtggacttggcgtgctggtccgttgtcaggaggaagaggatgagcgcggcgatgagcagcgccgtggcggagaaggcgaccttggcctcccagagcgacggcaggaggaggcccagcgcccacggcaagcacggggcccatgccgggaggatggatcc

SEQ ID NO: 8318 - DNA, 1124 bp, Zea mays
tagtgtaccagtcctatccaaataatccaaatgccagccaaacatgagtaacagcaaaaaacgcgccagcctatccctaatcaatgcagaaggagcagcaccagctgggccaaggcgaaggcgagcacgcccacgccgagcggccgccggtgacccgccgaggtggtggcgatctgtatggtgaagttgcaggcggcggtggacgggtccgtctgcgtgggcacggcgaggccctggaagccgcaggcctcctccttctggttctgcacctggaagaaggcgttgaatgcgtaggacgcgttgccgttgctgtccatgccgccgcacgtggagccgtagcccagcgcggtgcagtcggcgaacgtgcacgcgtagttgatgttgtcggcgagcttgtccatgttgccggcgttggtgttgacgacgcaccacgtccggggcaggtactccacgccgcgcgccggcaccagcatcgcgttctgcccctgcccgctcaggtccatcgggtacttgggctgcccgtcgtaccggaggatgccccagtgccgctcgaagttgcccggcgccacgctcttcacgtcctcgtccaggagcccgaacaggtacacctcaatgtactggttcggccgcgcgggcgtgccggcgttcgccgccagccgcctcagcaggccgttgtagaaccgctgcgcgtacgcgttggtggcgtgcttgtcgccgtcggtgggccagccgacctcgcccaccacgacgggcatgtcgccgtgccccaccgacttgagcgccgccaccagggtgtcgaagttggcgtcgaacacgttggtgtacgacacgccgctgcccgggtccaccagcggcgccgcgccgccgtcgaagaaggcgaagtccacggggaagtcgtcgttcaggaacaggctgatgaacgggtagatgttcaccgtgaagggcgcgctgttgttgctcaggaactgcaccatctgcgtcatcaggtcggcgatgtcggcgcgccaccgccccgctgacggcaccgggttgtccttcggggacatgtacacgtcggcgttcagcgggacggtggccttcacggtgtcgccgagcccggcctcgttcagcgcgttctggatgtt

SEQ ID NO: 8319 - DNA, 1138 bp, Zea mays
tacaaatgccaaaatcagttaggacagtgcttcagtgaatagaaattagcaaattgttactcttaccaagggccaaaattttttgtgcattctgccaagacaacctaatcatggaaaagatgttataaaaacaataaataagaatgtataagaagtccaaggacacagatagaggacgacttcatgctctaacctctggattttctgacataacaccgataatgaggcctgttaatccattagtgccagaggatggcataagctgtatgcatttctgtgctaaatggtgcatcccttcaaaaccctgacaagatgtatattttattgagatgtaagatgttgatttttcaaacgcgtacttcctttggaaaaaaaataaaaaaggggtatgaagtattgaactatatactaaaagtgtttcctaacaaccccttttgaagtgatttttattgcgctttcatttcagctgaagtgaagtttgcagctcaagcaacacgaccaggacaggctgaatatggttgtggtcaagaagaggatagtgaaatggatgaacaacttcactcgaaccaacaacccaatgtcagacatcatcaaaatctaaaccaatctgtaacaggatagctgccttggctttatgtttacttttggatggtaaactgatatgtccagcacctaaagtggaaacacttgctttgtatagagcagagagaactctttccaagaaaaagaaaaagggaaacaaagaaactatatactgaaaaacgaattgtttgcatgagaaaaggaagaaattgaagggctaaggctgtctccagcaaggcagcaacatcacctaaatttcatcctctaaaagaatattctccgtcctctacagcacactctaaaagttttttgtcctctatatttgcgtcatctccagcagcgtcctctatatctcatcatctttaatgtaccaacttaattaatgcaatttattgattttgggattaaatagcgacaacagtgttctggcccatggcttaaacatttcgtcaaacaccctccatgcgtcatctggtggttgccgcctccgtccgctggatgccaatgacatccacaacacctgaacaccatggccgcggtgctgcaggcatgcaag

SEQ ID NO: 8320 - DNA, 1219 bp, Zea mays
agggttccaaacttcatcatagggagggctggatatgggcaggttaggttcttgggcaacaccgatgtgaggggcattgacctgaatgaaattgtcaggtttgaaaaacactatgtggtggtttatgaggatgagacttgtaagccacctgtagggcatggtcttaacaaagcagcagaagtatccttgctgctgaatccgaaggatcatccggagcccagtatccttgttgaagtgctaaggtgtcgtgcaagaaagcaaggttctaggtttctttcattcaatccagtgaatggaagatggaaatttgaggttgatcattttagtagatttgggcttgtggatgaggacgaagaggatgctgtgatggacgaggcagctgttcggcagccaattactgaagtaagagaaagagatccaccttcaaatagttatgagattgagctctcacattcattgcctgctcatctcgggcttgaccctgcaaaggtgcaagaaatgaggatggtgatgttttccaatgaggaagaagatgaatacatggaggatgggttcccttctgacaagaggtaccttagcagagaaaggatgaatgtggattcacctacctcaagcagtaaaggttcgaggttaaggtctctctctcccttgcacatgtcttctcagaaggctggcaggagatctggtatgcctgttcggaaagaacgtcaggcacttttggaatacaatttgaattcttcagagcttggttcatcgaatcagggtattcttatgtctgggcaaaacagaggatttccagtgagtatgaccaaggtggaaggctttaagctgccgcctgagcaagaaactcctgttgctggaaacacgtatactatctgtgtagtggatgctgctttattcatgggtagatcatttcgtgttggttggggaccaaatggtttacttgtacattcaggtagtctggtcaatagtcctggaactggcctatcttctgttattcacatagagaaagttgcaagtgacaaagttgtgcgtgatgataaggataagattaaggatgacctaacagaactatgtttttctgctccaatggacctccataagagtcttgatcatgattttctagagactgagtctgactcgttcagattgaagcttcaaaaagtcatgacaaatcgtttggttttgcctgacatctgcaggtcgactctatagggtc

SEQ ID NO: 8321 - DNA, 1193 bp, Zea mays
ttccactgatacagttgtaattaatgcttccaagtttgtgtggtcagtggtcactagcgtctcagctagagatcctctagcttgtgaggtacgaaatatttatgcaattgtgtttcctagttctggaattagctaaactcaccataaagtaaggtactcttgtagcagcattccatcagcaatttattgtctcgagtgcatggatgtaaaaatgaaagactcacattgacaacttttttcttttgcctgctgtacactgcttatttactaaatatcatattatcatgattattcacattttaactcttgttttaatatatttttccacttgtctagatttggttacaatacttttatggatagatgttagggatggctaaattcttcacagttaggtttaactttttactcttgcaaacaccgttacaaaatgccatgcaatctttgtgttactttcatttgcaattccttttatttcaacattagcctaaataaatgacagcttgcagtttatttttggggtcaacaatcaaatatggcattaagaaacacattcatgttccttagatcttgagctttgcaaaatgtggtgatgcaagactaaattgtgacctacctacacacttttaatactaccttttgacttctgcttatttgatactttatacagggtctcaccctttgctcaaccacagttgatggcgaaaaagttctaattgcctttggcggttacaatgggaaatacagcaacgaggtgctcaatttaagcgaatgatatctagtcatgttacctttttttttcaaatgattcatatgttgaagttcagatattagattcatttttctgggattgtctttgtatatgttggcgacttgagtgcctgagtttctttcagttacctattcctgatgttaaaagacatgcttaactatctgacacaaggagcattttgctgctattgtttttcttttgaaatgattcatatgttgaacttcagatattagattcatttttctgggattgtcttcgtatatgtgggcaacttgagtgcctgagttttttttttcagttatctattcctgatgttaaaatacatgtttaactatctgacagaaggagctctttgcttcagatctttgttttgaaatccaagccaagaaatttagtccaacctcgtcttcttcaatcagca

SEQ ID NO: 8322 - DNA, 1074 bp, Zea mays
aaaatgatgtcactgactcactgtataatttctctgatggatatatgattacagaaaattcatggagctgctctggatatcactaaggctgcacctgtttttctagatgaaacaactaagctgtgccgggcatactctgaggccgcaaaagtagacaactgcacaatgagtatagccgatgaagatgctactgtgaaacacaacaaacaaggtcttgctagtgatgtcatcaggattacatcatccactattcagactatgtgtagattgggaacctatgcagcatccagtggtggaagccaggtgattttactgaatgtatcatggaagggtgtagtctcattactccaaagcggtaaagggatgattgaaggaaaagtaaatgtcagagaaataattgtaacccttctatctctgtccatagaatctctaagagttgctgctgaaacatggtgtgcaccgttactagaaaccattggtgctactgaagccagaagggcgttcctaccaatcaagtttttcttaataaatgctgtaaggatttgttcaacatatccatctgaagcaatgattatatacaagaacataatcaattgtgcattagtgatcacatcctcaagcattctatttagcaagaagccacagttgaaggcagcaaatgagacccttgttgaattgttggagcctactttatttgttttactagatacacttatgaaatcatctgacttaacaccagaatccaaatgccagcttgcacatcatttttttgaaaacgaagaagctaagagtccagatcttatgggacaagctaatcagagagagataaatttggcctcactggattgcattttctctatggattcagatgtggatcatagaaatagagcacttttacctgctgagttgcttgtgtttttgcactttctcaatgcttcatcatggttgacagaaatggtggtcatcacattatctaaaaagctacagactcttcttaatatattgacatcagaagacatctactcctatgtccttggcttccaaatccctgccttaaatggcgcagaccagtct

SEQ ID NO: 8323 - DNA, 1182 bp, Zea mays
cttgcatgcctgcagctgggatttaaataacccgagttacaacaatcgtcttggctctttgtgtgctggcaaagaattagccccggtacagaacaagatggggtcccgtctcattctacagaaggggagacagattcagcatactgtcaatgataaatattttagttgacctagttcttacgttcaccttacatcacctaaaattaactagccatgaagacaacaaacgtcacttgaaaagagtctcgagtattcattggccaacatggcaaggcaccaggctgttgtacacaaggaaccctttggcaacaataaggctcgtaaagcataatattggttgtacatattccttcccctgcttcaagggcactttctctgaatataggaaaccccatgctcttcatacctggcgcgagacacatggcacgcctcatcaggtgtccagggcaagtatagaaaaaacagagggcctatcaaatatcgagcttactctgctttggagaaccacatctgctggaacgacccaagagatgctagaatgctccctccaatccaaacactgcatgtcaattctccaacaattcagccatgtcatttgtaagtgccagcaataacctaataaataaatattctagtctgacctgaaacgtctctctactgagtttccgcttgccataaccttgacacgagcagcttgaggagactcctgtaataattcaatgtggtaataatagctagcattaaaaatgagtaaagagcgacttcaccatttctaaccaacatgaacaaagagaattgtttcatagttatcaatatcaactaaggtcgcaaaatacggaaaatatgtacaaaacaatctaaaatactcccaccatttcatttgtaatagtttcatagtgggaattattaaattatattgaaatgagaattttaaagcaccttttatggcctgtttggttcagcttttttctgaccagcttttctgaaaatctggctgtgggaagaatctgtggtatgtaagtagagggactctaactctcatcagaggatgacactatgagttggggcaattttctgtttatttcttcaaacactacacaatgtcatacccttagaggggttggggacacatatttatagccctaggggctgcactacactgcactacacactacactacac

SEQ ID NO: 8324 - DNA, 1152 bp, Zea mays
tttagagttgacctgcagcaaacaatcacatttaaaccatcagttttttttaatccagccccatacgccttttgcatctactatagcaaaatacgagaacataaggtatgaaacatttggactgctttcagtaaactagaaaaagacaagaacataaggtatgtaagctccattgaacagagactattccacaacatggactgctttaacgtttggactaaatcgagcagtaccaattcttctagtctactgccaaaagacaagaataaagcaaaacagctctccactgaacagctactatttcaaacatggactacatgaaacctgtgggttaaaacaaagtcccaattccacaacagtgcaatttgctactagcactgttctttcgcagcagattgcaagaaaagagcaaggtcgcacttgctgaactcaaaagttacctggcctgtgctctcgaggcgacccttgtaaacacgtccaaaacctccttctcccaggaagcattcaggcctgaagttcctggtggcagtggcgagctcacggaaggtgaaagtctgcgctgagatggcattgccgttggcatcctttggcactgaagcctctttggtgagcccattactcttagctcttgctttctcagccgctgcacacatagacaggttacaagggggtagattcagtaagctaatccgcagtccgactcggacaaagagaatcactatttaaactagcatgttgtgatcgcatcagtacacacgagttcatctccccacaacctttacatgtctccaaggcttaaggtagtaaataaatcgacctgatttgcagtaacaaataacaatatgtcaacaagtcaagatggttcctacttcttctccctttgcctatcgagaatttcttaaccacggacgctaattcaacacacaaagatggccataagctacacgaagccgtactgaatcaaatcaagtagggccggtgcggttgaaccaccgcgctgggagcctgggatccgaacccacccaccaaccagcacgccccgggatccagtccacccaatcaccccaaagccgtggaacacgtagctcggccaaggagcacgtcacgcacctgcggagagcttctcgacgcgcggcgccgccatgggcgcct

SEQ ID NO: 8325 - DNA, 1121 bp, Zea mays
agagatcaaggcacaggaggtcaaggtttcggtgcaacagcaagggctatagcggcggcgccaacatagtctgcatcaatggttctccgggcattggcaagactgagctggcattggagtttgcttgcaggtactcacagaggtacaagatggtgctgtggattggaggcgaagctcggtatctgaggcaaaacatactcaatgtatccatgaatctgggactggatatcagtgctgaggctgagaaggagaggggcaggatcaggagcttcgaggaacaggaattcgacgcgttccagcgggtgaagagggagctgttccgcgacgtgccctatctgctcataatcgacaatctcgagagcgagagggattggtgggaaggcaaggacctccatgacttcattccaaggaacaccggagcaacacatgtcatcgtgacaacacgtcttccacgcgtgatgaacctcgagccgatgcagctgccgcagctctcgtacatcgatgcgatggccttgatacaggggaagagaaagaaggactatctgcctgaagaagccgaagtcctcaggaagttcgatgagcggttaggcaggctgagctttggcctgtgggttgtcggttcgctgctttctgagctcatgatcgctccttcaactctgtttgaggctgttgatcgaatatcgctgaacgagaatctgttccccattggcgccaacgacgatggattctgccgcaacaattctttcttggtgaaggtcttggtcttctgctttgctctgatggaccgagcaaaaggaggaagccttacgtcaaggatggtcatcgctggttcttggttagctccaactcctgtatcgtccacgctactagctgcaaccgcgagcaagctaccgatgaaaggaagtggtatgcacctgtttggtgaatctctcaggactgcatttctatgtggcacacattgtttcctagctccaaacgggcggaaggctgaggtggagtcggcgctcttgcttgtcaaccttgggttggcaaggaaggcaaacaggcatcctggttgctggatccagttccatcctatcacgcagctcttcggcaagatcaggggaggtttggtgcctacg

SEQ ID NO: 8326 - DNA, 1177 bp, Zea mays
agataataaatcgaccaactcaccaacagaataaaaaatgcatggtaatgaccagagcaagagcagaaaccacccaattattattggcaaacacctgattgacattgcaattctcatatggttccctgcgaacaactaccaaatgaaaacctgagaggcgaccaaaccggagggcagggggcaattgtgagcctatcctgctgacattgtagacaaaatccataacccatcatcatcatcgtaagtgtggcggcagtgcagtgccatggcaccctgcgccaccacaaggaaagacatcggtacaggaggaccttgccgcgcatggaagaggcatgtctactccttgtatttcatgctctcaagcgtgaacccaggcatgtcgaaggagtcggcaaacttctccacctggaccttgaggttctcgatgtccttgttgttcaccaggcccttgttgaagtccttgaggagcttgccgtactccttctggatgttcaggcagatggtcactgcctggtggaggaactccccaatctgctcgaaatccttctccagtagacccctcgaggtcattgctggcgcgcctgaagtcaataatagcaaagatctgtgactaaaaagcgtactgtgtaggcatagcaagtatatatgagaaattttgtttaagcattccaggaatgtcctagacttgtgctgtaacagaatttccttccagagcttaatatgagataataccagcagcgctgaatagcatcgatgcacatgtatacatgttctactctgaagattgtgttacagtattttattgtatggcaatgttttctgagttaaatgcataagtggcccttgaacttgtcaagggatgtcacttaggtccacaaagtttgaaaatgtcatttctggcatccctcgacaagttcaagggcggctcatgcatttaactcttgttttctagtagagttcttagctgtgtttttttaagtgttgacatgcactttcagggttaagcatcatactggacaaccaatatgtaagccatgtattatgtgacaccaataaagcaaggtttggaattttcaatcttgacaaccaactcattaacatttgcaagaactaaactactctgcataggaaaaatgtgaagaacggtgaagtgaaatggaaccagaactattaacct

SEQ ID NO: 8327 - DNA, 1213 bp, Zea mays
cagcataaaagttctcattcaggatttcacaaattgataaaattgaaatgatctatctatgcaggaagagctgtgcatatgagttggaagttacagcattacaatgaaccgacatgtcctgaacctccatccaccaaggctacctagaactgcttggctgctgtgtctccccaactctttcaatttcaactgcctgccgatgcggtaccattgcacaaagtttatttgtcaggaattttaaccaagtacaagcagcatttagcaaagcaaacggatgaagaaacaaacatcctaagctgcacaaagtacgtattatggtatgcacatattctacagcactaaatatcagatatgtgaagatctgctgaagaacaagaaataatgtaccatgtcagcgggctccttaggtttgctcccgttagaggttcctcttctagttggttttcttatcttgtggaaggatccatggatggaatccatcaccgagccttcaggccactttccacttctatcggttggatccaagttgcttggaccccatgtgtacatgacaaacttccgaacctgttagcagtgacatcaacatagcttattgatcaaggagacagatgtatgggtatggtactatctttggatcaagatgtgttttaccttgttccaatttcgttgagcgcgttgtttgctcaggattttcagcattctggtatcctcgtcacgaagcttctttattctgccttcacactgaaaagtcacttattaattacagaagcagttgcatatgaaatccatgtgcatgctactaaacagaaattacatggtgattccttagtttcggtgtcgcaaagggtcagaaatttctcagtgtgactgtgaatcataataccaaatagttgtatcgatgaatctgaagtgggccagtaaatggtaaaaaatggatttaaagcaatcataaattgatagtgaagttttaggctaatgtaacagactgtagaaagactggaggagtttcataaatgaaaacgatggcaaagtattgacataactctcgaacactcaggagagcagtattgacatacttaacatcgaatacaggtaagatgacttacttgagccatgagacagagaaaaaatgcaacactgaaggcatacaggccaccaatactcgcaagaatactgactgcaggtcgactgtagagcaccccagggaccgagc

SEQ ID NO: 8328 - DNA, 550 bp, Zea mays
acggcgtggacgagtcctacacgctggagatcctccccacgggcggggccacagtcaccgcggtcaccgcgtggggcgccatgcgcgggctggagacgttctcgcagctgtcgtggcgggccggcggccggggacggcgccgggacctgctgctagtggccgccggcgtgcacgtccaggaccgtcccctgtacccgcaccgtgggctgatgctcgacaccgggaggacctacttccccgtggccgacatcctgcggaccatcgacgccatggcggccaacaagatgaacgtgttccactggcacattacggactcgcagtcgttccccatcgtgctgccctccgagccgctgctcgccgagaagggcgcctacggagaggatatgctctacaccgtcgaggacgtcaagcgcatcgtcgagttcgccatgagccgcggcgtccgcgtcgtgccggagatagactcgccgggtaagccgtgcccgtgcccgtgagttctgcccattctgttttcctgcttgcttcgtcgggaacgccgtcgacgggccag

SEQ ID NO: 8329 - DNA, 1057 bp, Zea mays
cttgcatgcctgcaggcgcgatggcaagttggcaatggagccacggacgcccggacaagcactcagctttccgagaccgctgtcggctcgcgcacactctaataattaaacaaaccagttagacaggctctctccctaagccccaaccacttgccaccaggttaatcatcccgagagcgatagggaatccggccctcggattattctaatactactgctactcggctcctcctgataattgcagagctcctcttaaaaaaaacccgccatattctgcgctgcgctgtgctgtgcgcgcgagcgcaggaatgagatttgtgcaggtggcacgagctggctggtgggcctctgaccgtctgattggcgggaccacctgtgggctgtggctttgcttacagattctgcgagaacaaaacaaataatagccagaggagaggagaggaccctaagcaatccggtattgtgttgtattgtattgacggtaaacttacccctcgtgcaacaactgctagcctggttttgtttaattagtccaagggcgcgttggcttggctgcgaggatctcgagacgtactactacctttgcctctgcctctgcctctgccgaccgatccacaacgccacatgctgctggaatgaatgattagccccgggagctggagctgcgtgctctttggtggtggggtgggtttttttttttaagcgatggtacagtacatgtgaggataacgggattgggacaagacaggcggagagggggtgttatctggcggagaggaggaatgtgatcctgatccggatggatctgagcgccggccgtgtgttgagttgcttcgatggtagaaaaaatgaccgggcgttgtaagtgctgagtggttaacatgacatgatgatcggagccacggtgaatacgtctctgctgaatggtgcttgggatttttagtaacggcgacagtgagtggatgaaaaggaagaaaaagctcccccccggccccccgcggccgaagttttgacctgttgacgaagagaatcgcgacacgtagtggaactgagacat

SEQ ID NO: 8330 - DNA, 1129 bp, Zea mays
ttgtcgagatcgttgatcggtatgatgatgcatgtgtccctgctggtgtgactgacaagcttgcttacatccggaatgatagtataccaaaaagctgcacaaggaatctgacggtaatggaattatctggatgtattcttctaaccggaaattttgggaatggaaaaactatatcatgcaaacaacattgagtagtgtgtgacatgtcagctattttacagatatgcatcttgctattaaaaaaaatcaaatgagtaattagctgaaacattcgatttcatggtcttcagattacaaaggatatgaagcagccgatttttgtgtattatcagctggatgacttttaccagaatcataggaggtattacccaatgtcctctctctcaaacttttattgttttacacttttgtcagtgagaagccttcttgctatttagggtgtatttatccatacttaattgaaacattcatcacatacaggtatgtcaagagtcgtaatgatgcacagctaagagataaaagtaaagcgactgactttaccaattgtgatcctgaggccaaaacggtagatggaaaaccaattgtgccttgtggtcttattgcatggagcctgttcaatgatacatataaactcattcacaacaatgtaaccttgagagtggagaagaaggacatctcttggaagagtgacagagaccacaaatttgggagtgatgtcttcccaacgaactttcagaaaggacctcttaaaggtggaaaaacacttgatccaagtatcccggtatgttcatggatcttgctttgcattatccaattctacgcataattggttgcacctcatagggaaattatgcttttagcatatggtagctataaagtttaaagaccaaatgactcaacatcatcaacaaaaacaacaataataacaaaggcttttagtcccaagcaagttggagtaggctaaagaccaaatgactcccaatgaattttctcgtagattgattaagacaagctcttgatcatttaggataccttgtgcccccgaagtcactaacttgttttccttctgagcagttgagtaagcaagaggacctcattgtttggatgcggactgcaggcatgcaagatg

SEQ ID NO: 8331 - DNA, 1090 bp, Zea mays
aaagcacacaggccgaagatgatgaagtggatgaagaaaggcgcaagctgtcgaggatgtagaggcgaggagcagtcctatggcgacggccggtcccaatcacagaccctgtgcgacgatgtgcgatgatcctgtacaaaacaagttgagtcatcaaatccaacaaagcaattgtgttctataatttgttcaacggaaagaagattcatggacaactcagggacaaaaaatatattaggaacaataatctgaggagtgcaaagagaacccttgtgggttatatggcataaagtaccatctgcggtctgaacagaggcatcttctataacaggtgtagaagagactaactgtgactgatcagatgtcacatgaaaggaggcccctgagtctagagcccaagtcgatggcgaggctgtagctggtgaagtagatgcaatatcaactgaacctctagatgtagaacctgtgccacgaccacaagctgtccgtcatgtacggaaatcggtcggcttctctggaaatttaacaaaacaattttcagaccgatgagtgttcttgcaatgctcagaagtccttaccacataggacttctgagcagcagccaacacactgtgagagctagaacaagcagcataagacaatgctgaggccgagtctcttcagcaagtagttcagacaatgcctttgccattgtgagagtattagaactgtggagcagtcgtgcacgaagagagtcatattcagttcgaacccccttaacaaatctgtatgtaaagaacttttcaacaaacggatgagccggacatggattagttgcacaggctggcacaatagatagcaaaagaactcatcaaacgatcaagagcagaatagtactcatcaatagtcacatcattctgctcaataacatgtgtttgctgcataatagtgtctaagagagcactactgtcctgaacaaaccggcccttcaaatgagaccaaatagctttagcagtggtgaacttggacaatgtcataatcatggatggtttagtgctattaactatggcagccatcaccttgccatcattggtctgtcaagttttaaagt

SEQ ID NO: 8332 - DNA, 1155 bp, Zea mays
cataaaggtagaagccatttgaaccggcatactcagacttgtcctgcacgaagtggaaatatcctaaatcatcagaaaggtgtgtcgttccagtccaatctattgagttctaaatctagccttcaagatgagctttcacctgccttgacaaatggcaaaattcagattgcagaatatgctagtaagttcctcaaaggcagctctagcgatgcaagccttgtggaacgtcatgttctagctttaccagcaatgtatgatatgaatccctcagagaaaagcaccccatcagctcagactgctgctgatagaaccaggaaaactgaccaggaagcatcttatctagaattaactagaatggttatttcacatggctatcccttgtcaattgtcgagcatgaagaaatgagaagatttgcaaagagcctaaaccccacattcaacatggcttcaagcattgatatagaagagtattcaactcttttgtttcagaaagaaaaggctgaccttaaggaaagaattgcacttctgtcccgtcgggtttccttgtcagcaagtgtttgggctcctgatggagctgaggcctcggtgaagtatctctgtttggcagtgcattttattgattctgattggaaacttcaaaggaaaaccatcaaatttggcgtgttttggtccttgcctactagtttggaaaggatgatacagtttaaggaggcctgtgtgctagattctgatattggaccatttaatgtcatacaggaagctttaagggattggaatcttgatcagaagcatttcagcttgacatctggcagtgaaattagaaacgacgagagaacctcaaagctgatggacttgctcatccaaaggaaatgccttcctataagaggtgagctatacaatatcgattgtgtgaatgatgtacttaacaacattgtctcaaaagggcaacaagtgctttgtcatgttggtaacatactagagacatttattcgggcacatatgtccttatctctgactcgacagcaacttctagaagctgttgcacatatgggattgaagtgcccacacgaagatgcaaaatggtggcacataatatactttaggcttgaagttcttctgcatttcaagaaggcattttacatctgaagaagtgtt

SEQ ID NO: 8333 - DNA, 1115 bp, Zea mays
acagcaacttcatatcatgagcgatgaggacgccaatcatatggccaactgatcaacaccatcccctgatggaatagagctatatacacatgcatgcacacatacagacacatttgtgctctgtacaagcatttttgctgcaatccaaagttccaatctgggacacctacctactgcacacaaagtttgtatccgagcttgcttgtgtttgtttattacctgcatgtggcttctgatgatcagaattgggcagacccaatacgatacgagaagttccaaactgggacagagctagcgtaggcagtcgtctgtaagtataaataagaggcgatgacgtgtcatcgtcaaccacatgaaacaaatcacagtgccggaccggtgccatgacacatcgtctcacgttcgtcgtcacctcctgtggaggatcttcaaataacaaccgttgcattgaagagagtcttaacgacgcacaccacttaattctcagctccctccctgtcgcgcagctagctagctagctgacgctgtacgtgccgatggaggatctatctcacggcaaacgcgtgcacagcgaaacagcttttggttaggacccagatcgacaactagacaagcaaagcagactacgaatcccagacgtccgatttggaccacacggagcgagctatcaggaggaggacgtacggaggtgtggtgtggtgtgcactgccgcagcgcgtatctatccgttcgatgtgacggctcgcctgagcctctggctgacgcgcgcacagcgtcgacgtggagccgcgcgtggcccgggccggccgacgaccctagccagctgggcgagggtcgccgctgtgatgtacgtacggcgtgcatgcaccaggccgggacaacgcgtcgccgcgcgtccgggccggatgaccacggccgcgctctcgcgcctcgcggccaggccgggccccccccgaccccgggcgaagcgacgcacgcactgcccggccgttcagctcagacgtcaaacctcgccatgcacagtcgtcgttatcgttattattacctgaattcattgaaaaacccatacttcttcttgctacccaagtttggagctttctctgcaggcatgcaag

SEQ ID NO: 8334 - DNA, 1147 bp, Zea mays
tcttgcatgcctgcagaccctgtggttgcatcagaagatcaactgtgcattcaagaaataagatcaatgactacttaggaacaatacctaatagtaaatttcgaattacgtaacaaacaaggaactttgaagctttcaggataacagatagagcgcaaaaataaatttcaccttcctcaccctcctccacttcctccactttgttgtccccttccaaaaactggacaacttcctcctgctctgggccatcacatttcacatccaagaccacgactagatgataacacacaaccagcatcaaacactgtccccataaaaattgaacagtagaaccaaagcaatctaggaagtgaaatcctctgaccttttggttcctcttgctgcaccttctcctccccctttgggtcatcacatttcacatccgagagagcagctacatgataacgaaatcagcatcaaaaggctgtccacaaacaacaggatagtagaagcaagtcgatctgggaaatgaaatcctctcacctttcggttcgtcttgctgccccttctcctcttttgatgcgaccgccaccacctcggcttcctgatccaaagctctcgtcatcttcgatgtcttgtcctcggatacatcttcggcggggcggtcagcctccactgcccccgcggccttgcgagacgccgtcctcctgcgggtggctggggtcggcgccacctcgcctgtcttacgaacgtcggtcctcctcgctgttgcgcgcgcgctgcacgccggaaccggagtaggaagcggcgcgggtgtggcccgaatgccgcggcgagtgctgcgcagcaccacgccgggagtcttcacgatctccttcatctcgtcctctcctccaacctccatccggatggcctctggtgattttaccgatacgcggcggccgcgggggagcgggctaccgtgctgctgctcctcgacggccaccatcttagccgccgacttcatcgccgaccttcctggcgtcgccgtcggcagacggagagtcgtgccgatctcgtcgaccccgtcgacctgaccgacaagcaaaacccccacatcaactaccattccgaacctaataggactcacgaacgtactacacgagtggaatcgagaactcaccgaggt

SEQ ID NO: 8335 - DNA, 1078 bp, Zea mays
cttgcatgcctgcagccaattatacaagtttggaagcaccccaaccccaggaataggagcggtgacaccaggcagctgacctgcaatcatcaacagaaaaaatttgtggaaatgatgattaaacttgcctaccaaaagatactatagaacaaaataatagaagaccaccgttgctaaaatccatacataggaaacccttttcctcaaaactccatatcagttgtgccgtattgcttcaagaaaatcaaactatgaaactaccaaaaatgtaccacatgctgatatgaagataaacaatatatcacaccagatagtgtcctcgtacattaaagctacagcagtcagctcaatccagtggaagccgatgacaatgtgggccaagtttgcctcctaacccatatacatacacaaaaaaacaccaacaagaacaaacaagaaaaaatttactcagattcagccatcatgcttaataaaatgaaaatacacatgtcttgtaaaaaagaagaaatcagattcctagcacagataactctttgtggagacaattcagattagagcaaagttgccaaatgccaaactctctaaaaaatggcagcagtagtagtagtaatgatgacatcatcagaaccactagtttatatattaacactgcaatgtaaagcttaagaacaaattaaatatcaattttactaaattgtatgcattttaactaatcagcaagttcattgatgagtaattccaattatggataataaatacatgtaaagaactatgatatttcaatcataccagggataacaccagcagcaacaataggaagtgcctgttgtgtaggtgcttggtcaaaaccactcacgcgcttgctgttcagaacaatagatgttagcaagtagataaacaacagaacacagcacatctgacagactgacagatagtacaacaaaacaaaaggacaaccattcttttgaaatgaataaatcatgtccagaaagaataaaattataaatacaatgcatcaattacacatgtctgaattttaaagcaacaaataaacatatatagaaattgaaaaatactc

SEQ ID NO: 8336 - DNA, 1121 bp, Zea mays
agcgggcacctccatgcttcctaggcagccacggagaagaaatcccttcggctactaactcttgtgagctgctaccatcataggacgtactaagtgctatgcacatcgtctctagcgggaagaggcctgtctccatccttcacgatatcagtggggtcataagacccggcaggtaagaagccaaagaattttaaagtgcaaggttttcagtttttctgtagttgtacttactaactggcacttctttcagaatgtccttgctgcttggccctcctggatccgggaaaacaagtctacttctggctttggcagggaaacttgactccaatctgaaggtatcacatcttgcgataatttcatgattttgaacttctgaattctagggaaaaagggtatatattgggagagagagagatagctgtaaactgtactgaatatgtgaacttgcaatgggaattttcaggtgtcaggaagagtgacttacaatggtcatgacatggatgaatttgtccctcagaggacatcggcatacatcgggcagcacgatgttcacgtcggcgaaatgacagtccgggaaacacttgccttctctgcaagatgtcaaggagtcggaacacgttatggtatgtaaacacagacaatggaaaggagcacagataattattcaccttcggtgaagtgaacctgatggtgttttcaaatcacacagacatgcttactgaactttcaagaagggagaaagaagccaacattaaaccagatcctgatgtcgatgtttacatgaaggtaaaaattcatttaattcaaaccaaatcatgtgtttacattggaagtgacaaaggttactcaaagttatttgtgcttctgtgcaaacaggctatctccgtggaaggtcaggagagcgtggttacagattacatcctcaaggtaagtaaaaatataccgcagaaaaagaaaatacgagaaatggatatgccccctaacagtaattgtatttattttgcagattctgggtctggagatctgtgcggatacaatggttggagactctatgatcagaggtatctcaggaggacaaaagaagcgtgtcacaaccggtatgtgcaatctgcaggcatgca

SEQ ID NO: 8337 - DNA, 1094 bp, Zea mays
tgtccacgtctgagagcgttttgcagtcagtcggagagaatctgagaaccaatggaacttggggccgcacttcgtatgtagccatgcactccgtacgcggtggaaaaaaaaatacgacgcaaggttagacgacgtgaccaggacgctcttctcactttaattgaactgtttttagaggatgctcaaaagtgataatcatatggttgagcgcacatttctggacggcatgactcgctgacagtgacagcgaggagtgcagagtgacgagtagtgtgcgacttgacctgggtcagctgctctgatgcgttccggcggtgatcagctgatccgccggcatgcatggtccatggagcatgacgacgtatattacgcgcggtctaatgcctgatgatgtaatatatttcttagctagctaattgcattaccaatttttagccaaccaactattagtcgttctagtgtattcaaacaccccctaaaagttagtttaaaactaaaatctccagaattagatgagttgatgagaaaatgaatcaatttcctcatcaattatctctaatctcggaggagatttaagtatctaaactaggcggtttagagttcgactgcacggcgctggagtgggaagccttttggtacggttacaacttgtcaacttacaacttcgatgtgcaaggatcgcgttgaatttgaaaccctgaaccaatgcgcacgttaacagaaaattaactgaatttgcacaccggctggaaagcttacaaaatcaaacggagcacagcagtacactagatcagtattaccaagcttttgctatcctatgctagccgccgccaactatatgccagccttattgcatatcctaatatcctacctctatatatgatatatatatgttgaacaatacaccatggatatattagtagctatcacactaacacggttgcatatgaatctggagtatataccataacttcactgtggaagagagaagcctgaagaagcatgcatcagcgacgtgcgactagcgtggatcgtcgtccatctcaatcatcatccgtcttgggtgaagaaaagcagctgcaggcatgcaagat

SEQ ID NO: 8338 - DNA, 1185 bp, Zea mays
ttgcatgcctgcagtctgtgcagcgtcatggtcgcctgcttcctcaccaggtagccccgtaccagcgcctggatcttgacgagcgaccggagagctcggagcgctctcctagcctgacaccaaggattcgaacacattgtcagactctccctctacgccaattcattcaaaaaaaaaactgttgtcgtccgtatattattattataaacgagtccggattaggtagcgaggctcatgtcagactacgcgataaatcaactgctctgacgccatacagggatttggtggtactgtgaagtcttcggcggcgcagaagaacacagtaaacaattgcgcgacggatcgacgtgcagattttgtatagcagaacgactgtgtaccagcatggaaaagaaaaagggagcaggagcagaagtgacatcacatatgtatgatacaacagcagcctcgcccacgataggcaagccacacagtagcaaacaaaacaaaagtcctgaaggatatggcaaaaaaattccactgaaagaggcgttcgcatcattgcacaaaaaagaaacttctatacttcatgacctttttgcgcagtttattttttaaaaaaaaaaaacaaacaatactcctcgcgtacgtacgatacgagtgaacaaaccagagagcgagaagagtaagcctggaagctcggttcgatcgcactacgtaccaggtagcctctgaaggttttctggatggcgatcgcggcacggtgttctcgagccctcgcgtcctcccctggcctccccaccagctgcgaccgttccaccgcggcagcaggagcgacggcgtccggacccgacgaccgcgcgcctccgcctccgctcttcctctgcttcgcgaagctccacctcctcttctccttctccggcccgtcgctccagccgctaccgacatggctcacctcgagtcctcctccgcgctcgtccttcctgccagccagtagctgcctgagccacctcacgacgcgcctcatgctgcgcctgcgattctctgcgcacgagaagaacgcaaggaagaaagaaaccggtcagcggaaggaaggaacggggtggggggcaaggcaaccgtgccgagatgggagcctcaacgggcggaattcatcgacgtacgtaggtaggagcaggagcagagcaatgaatcgaagaagaactg

SEQ ID NO: 8339 - DNA, 1117 bp, Zea mays
ttgcatgcctgcagaaagttgtctctaaaaagcgcaagtgactacaattacttgaagcagagtaattgcttgaaaatcaatggtgttgacgattcaaaaaaattcacagtgctagtggtaatgttactggaaaatccaaataatttcaccaaccaaagcggtgatagtattttatcttatttgttatttatcctctgtttcatatgcaggatgcattggatacaattcaaatatctaaggaagaccaaatgaaattattttctatgcttgcagctgtcttgtggctgggaaacatatcattctctgtgattgataatgaaaaccatgtggaagttgtctcaaacgaaggtattgactgttgtattttttaatttacaaataaaggggtttttatagaatactatgttttatagatatagaataaatttatttatatagaaaaaaactattctacaaaataaatgaatggaattggtaataataaaattgaaaaagggaactcattaaaataaaatatataattttcttttcccataatttgcatttatttctttgccttatccagtagaaaatgtccccaacatgcagacattagattgtgtattgtattcacagggttggctactgctgcaaagctattaggctgcactgcaaatcaactagtgtctgccgtgtccactcgtaagattcgagctggaaatgacagtattattaaaaagctgacattaactcaggtatgtagtgtccttaaaaattatctgcatggatctattgttttgatcttttagaattttattcaagatttctaattcctgtaggccattgacgcaagagatgcactagcaaaggcaatatacgccaatttatttgactggactgttgagcaaattaaccacacacttggaacggggaggcaatttacatggagatccataagtatcttggatatttatgggtttgagtgtttcaatgtatggaatattttcatttcatttagtactgatttacttggcaattggcatttcctcagttgtaacatttgattaaaccattacagaagaatggttttgagcaattttgtataaattatgccaatgaaaggctgcaggcatgccag

SEQ ID NO: 8340 - DNA, 1228 bp, Zea mays
tgttcatcaaccacgacatccacatgtaccacgaggagacggacacgccagcccacgccaggacgtccaacctcaacgaggagctgggccaggtcgacaccatcctcacggacaaaaccggcactctgacctgcaactccatggagttcatcaaatgctccatcgccggaaccgcgtacggccgtggcgtcacggaggtcgagcgagcaatggcgaggaagaaaggctccgccgccgccgctgacaatacagacaaggccaaaaacaacggcattcagcagcagcagcagcagcatttcctcgtcgtcgtctgatgataatgatgatggtgacaacaacagtaaaccagcagccaccaagggattcaacttcgtggacgagcgtgtcatgggcggcaactgggttcaccagccccgctccgacgccatcgagatgttcttccggctgctggcggtctgccacacgtgcatacccgaggtcgaccaagagtcgggcaagatctcgtacgaggcagagtctcctgacgaggctgccttcgtcgtcgcggcacgggagctcggcttcacgttctacaaacgcacgcagacaggcgtttatctgcgcgagctagatccctcgtccgggaaacaggttgacaggtaatcatcaatcctacgatagcattgtagtgaagaaactactagtccttttttcttactgtccatctcttttcttttcttatcttttctttgggcaggtcatataggatcttgaatgtgctcgagttcaacagtgcgcggaagcggatgtcagtgatagttaaggacgaggagggcaaactgtttctgttcaccaaaggagctgacaagtatgtactacctccagtaatctctaacctaacctgacctgctgtatgcgtgccatgccttgccttcctcgtccctacctcatctcgacatgtctgtgcagcgtgatgttcgagaggctgtcaggatcggggagcgcgcacagagacgtgacccagcagcacataaacgagtacgccgacgctggcctgagaacgctggtgctcgcgtaccgcgagctgaaggcggacgagtacgcgcacttcgacaggcagttcgcggcggctaagaactccgtcagcgctgacagggacgaaaagatcgacgaggctgcggacctggtggagagggacctcctcctcctcggcgctaccgcgtcgaggacaagctgcaggcatgcaagc

SEQ ID NO: 8341 - DNA, 1136 bp, Zea mays
gtgatgacaagaggaatagaaaagctctgagaattttaatagaccacagttttcaaaactgtactactaagatagtttcagaaatacattaagataaaagcactgatatggcaaagaaataacagtatgaagttgctgtagattatatatgcacatctgatcctgacattgctaaaagctatcacatcaacatagacaatatcaaaacaatattaagtgttcgcttgcatatttattgttttagttgctaaagtttgtacatttggaacattagcacagcacaagttcatggccctaccgacttgaaataaggggtgtctttattcatggtcagggactaatgcaacgtcctagagaaatacttgaatactcgatttcaacatttaaaatgtttctttttagcaggagtcagcagatgtttttaaccaaaatgaagaaaagaatgtgaaatcactatctccttatcatgtcattaactctaccactgccatgtcacttttatactgatgcgcaataaatattaggcagttagaaagctcggtaattgacaattattcatatcatcaatgactgagattggtggggaaggcatgaatggactaacatatatcttagtgttaactccacacacacaacagtacaacactcaataaacaatgaccataacagaaaaatgaaaaaccttaaaaacttgatgaagttgcctttacttattgtaatccatgacaaggagaagagccctaaagacaaaagcaggagtaataattacaattttacaactgatacctgctaaaaagatttgcaacttcttgacactcctgagagttgtaaaaccaaattcctataacttcttgagcagcatttcggtacataatataaggagcttgaagttggtattcaaaatctcccaagagatcttcaactagattatctgttaacaagtggatgccaacgaaatatgtagaaaacattaacggcaatgtgaagatataagcaggctttacatcaaaaaaagatacaagcaggctactttacataataagcttctgcaaatctcatttgagaagaaaaaaaaactaaacatacaacaaccaacgagtttaaaaaagcaacccatcttacactgcaggcatgca

SEQ ID NO: 8342 - DNA, 1061 bp, Zea mays
agcaagttccacaccgacgacacggcgggcttctccagcagcttcgacgtccgcgcactcgcagaccgcgtggacgaagtgctggtccagctcgccgagctccaggacaagctggaggccacggcgctgaaggtggcgaagcagagcaagaagagcaaggcccggcgcaggccgcaggagaacatgacgatgccggagttccggcggttcctggaggacgaggtcatccacccgctgtacagcgcgcacatcgcgctccggctgatccgcatcccgcggccgcccgacgagggaggggacggcggcgacgcctcctcctcctccggcatggacccgctcgtcaacttcttcgcggccgaggagacgcgcaagtacgtgacggccaagggcaaccgcgacggcctgcccagcgtgtacggcacgaaccggacgtacggcagcgtggggcacgcgtgcgtgctgatgcggcgggagctggacgagtacatgagctacgacgtgggcgcgcgctgccccgacgactgggacctgggccagcgcctcatgctgggcggctgcgacccgctgccgcgccgccgctgcctggccccggcctccaagctcttccgccgcccgctgcccgtcaacgagtcgctctggacgctgcccgacgacggcaacgtccggtggagccgctaccactgccgtggctacaggtgcctgtccgccaggaaccagcgccgcggctacgaccgctgcgtggggtgcttcgacatggaccgcgagaggcagcggtgggccaaccgcaccgcgtcgtcgtccctcgccgacttcctcgtcgacgacgtgctcgcggcgaaggcaggcgaggtgcgcatcgggctggacatgagcgtgggcacgggcagcttcgcggcgcgcatgcgggagcgcggcgtgaccatcgtgtcggcggccatgaacctgggcgcgccgttcgcggagacgatcgcgctgcgcgggctggtgccgctgtacgcgaccatgagccagcggctgccgctgttcgacaacaccatggacctggtgcacacggggggcct

SEQ ID NO: 8343 - DNA, 1174 bp, Zea mays
cttgcatgcctgcagagtggtcccaaaattttgacagaagaagggctcggtgtcaactacagagcactaaatgatctatttggtatccaggagcagaggaaagatacaatttgttatgaaattgctgtacagatgatggagatatacaacgagcaagtgagagatctccttcagactggcggaaacaaaaaatatcctttcacactgagcttgatattaatcctgctcttagatatcttaacttttttttttttgcatatgttgaacatctatcttatttatgtgggcctccttaacgccaagaaacattggaaattcgaaataattctcaaaacggaattgcagttccagatgcaaatgtggtgccagtcagatcgaccgctgatgtaattgacttgatgaatctgggccaaaagaatcgaacagtttgctcaactgccatgaatgaccgaagtagtcgctcccataggtttgtttgttgcttttgcattagtgcctccagtaccaggcatgatgttgaacttgtttttagctgatgtttgagtaaaccaattgcagctgtctgactgttcatgttcaaggacgagatttaacatctggaacagtcctaagaggttgcatgcatcttgtggatctagctggcagtgaaagagtcgataaatctgaagtggtaggaataggattaaaggaggcacagcacataaacaagtcactggctgcactgggagatgtgattgcagctctagcccagaaaagcacacatgttccttacagaaacagcaaacttactcaactattgcaagactctcttggtaacccccaaagttcgaaatccttggtttgcaacttgccagcaccaaagatatgcgctgtgagtattttgtttccccttttttcaggaggacaagcgaaaacattgatgtttattcacatagccccagaaccagatgctattagtgagtccataagtactttgaagttcgccgagcgtgtttccactattgagcttggagcagccaagtcaagcaaggaaggaggaggaggaggaggaggaggagaagccagagagctcaaagaacaggtgttcgtctatgaactctgcttcatggctttcttgagtttacagggcttgtgaccaacatcttctatgaaattgtgcctcattacttcctta

SEQ ID NO: 8344 - DNA, 979 bp, Zea mays
acctccacggccgaggactcctccaatatctcatagtttccagctgtctgatcacactgactggctttgccttcttccctaggctgtacttcagaccttgggcccagacgttcaagagcagatcgtctgcccttatgcacattgtcctccgcagagccccttctaccatcacggtcccctggtggcgaacgcgaacggaaacgccgcccctgccgtgcagaaccatccatatctgttgggacctggatgggatctaggacaacacgttgtccttccaacactttaatctgaacatgataggcaagagatagccttccaacgcctggtccatttcccagcgaatcagtaatccaaaggtctctagactgagggattgaggccaggtcataacaccaaccataacagcgaaagacctccaaattcttgagctcaagagtctcctcatgtaccttctgcacccaggcaaaagggttcaaactgtgtcggacaatggacagttcccaggcatgaattggaatgccacttagctcgaattccacagggataggcaaacttgcacctgaagacccaaagaacctgaaccatcttttacagtgcagggagaaggcgcctgcatgaatagtgttccatctcactgttagctggtcaactgactgaagggtgggaagcatgagcaggaaatgtccatgagccaattgccttaggattagcgaatcagaattgacttcaattttttgagcgactggcacaagcacatcactgaccacaaagatagacactgcgttcttcaaatcctcttctgctttatacatcaaactgttccaaccgatcacacatgggtgctgatgatgcattgggctgggttcagccagagggttctcatcatttccgggttgatcagattgcccacgacacggatcagatccacccctaggagatgacttgcgctttcgatggcgtctgcggctcgggggttgcc

SEQ ID NO: 8345 - DNA, 554 bp, Zea mays
aagaacggaaagagtaagatacttcattttggtggtagtcagattcgtgagcaagtcatgaatatgccaagagttataaggtgatccacaaacatttgaaatttcaacaatcaatcatcgatggtaacaacacaagtgtgccatgtgtcaacctgatcagatcatagcagataacaaaaaatgacttgaactaaatagtccaatcacaagatgtaaaacattgcattcaaaattagaacaattcaacaatattccaggtacaaataaaatactgcaatgaagatatactaccaacagtcctagcaaagtttttgttgactgcattgttgagtgaaaggacccaatgacagtcacgccagaattttcggagtgaaaaaagaggtatctgtctgcctcatatgtcaactaaggtcatttcttaaaaacccataaattacttattactcaaaaatgaaaaggacataaatgcatgtgaaaatgaaggtataccaaatcaaaggactgaagctactaatgcaacagctatggcatagaaaaatagcaacacaggacac

SEQ ID NO: 8346 - DNA, 1209 bp, Zea mays
acggccaatgagtacaactatggaatcttaactttccagtgtgactgtgtaccaatgcaacagtcatacaatgctaccattaaatggaacatgattgatatgactggtgaccatgcaagcgatgaagatttgtcaagctgaggtcaccagtgaatgtctatcttgcggcctatttcacattccacgttgtctacactctacagtgccagaagagtgttttgcacgtccacttattcatattggtgagctcagcctcagtactcaaaagcatcagttctcagtgctagcttttgccttttctttgttgattaataaactgccccaggagtatgccataaaagagactaagagaacaagcaagttgctggcaaagtttaaactcatcaaacaaagaattattgaaaagtatagatgtcggggagaatttggtacaaactccagttcagctttttttttcgcgatgggggatggggcacagcacgtttttcattaagcggacaggaaccaatcagcttttgagaagggcgtcttaactcctagtaactcttacccaaatgacttatgaagaaatgcttacgtagtgtggaagatggatgagcttcccctgacttcttcttgaaggaaagcttcaaagaaggcatcttcattgaatgagtagggctcgagggagttctcttcttctcgttcaccccaacagcagaggcaatgcatggcagacaattattcggcagaagcccgcaattgtccagtatcctacctccaccgtgcgtggtatccgcaccagaaacactcaccgcatcttcatggctaatggacgtccttacaccattctccgagctccccttcgacagttcgctggactttggctttttatggtgctgctcgcctgattgcgcagctccattgaagctcccaccgttgccatctttcatgctcaatgcagcttcattctcgaagccattcaatgagaaagcatctgtaagataacaaataagttcaatcagttaaatggaaaggcatgttaaaatgggggcgaaaactcagcaggttcagctaataattggaacaatgctgtgcgggggacctggctacaaggctactacgacatcgctcttaccatcttgcacgctgtggaaatcgtcttcggcatccgactcgctcatcgccaaggaatcgtaccaggcctcctcaatgctccctgtccctgag

SEQ ID NO: 8347 - DNA, 1126 bp, Zea mays
  unsure (1)..(1126): unsure at all n locations
tcttgcatgcctgcagatttagtgaattttccattcacagatccacagcatttgcagctacgtgcacagatatttgtttatggagctcttatgtgagttataattcttttaagttactaatatcccaaatgtatgaatccttatagccttatctcacatgcaccaattataaatctgtgataaacccaatgcacatatcacctgattcttccatttctgctccttcttaattgtaccctaaccagtgcagtaaacttgtcacatatctaactctagcggtaagtgtgataaactccaatgcacatatcacctgattcttccatttctgccccttcttaattgcaccctaaccagtgcagtaaacttgtcacatatctaactctagcggtaagtgatgagcaatagtgccaccctttatcttaatgcttgtgcccaagacaaaattgatatatgcgattggttggagtatttatttgtataatgtgatataatataagttatttttctttgagcagtcaaggaacaccaccaggagaggcttacatggtggcggcttttggagaacctggtttgtctgatttcactgtttaatgtagtcctcttccgcgctctatgtatcttatagattttgtgttacatgaacagtaggtggtggcaaacctacatgggaggctgcttggcgagctgcttttgaaagatttcagtataaaaaatcacctcatgtcagtttagagactcccacaagttcacttataggtaaatatatgaatgacagtggaacaatattgccagacatatatttttttctatttttttctgaccagccgagcttgcaggtagttctgtgcctgagaaagctagcaaaggtacagcaattacaactgtgccagctagcaaaaaagttggtaaaactgtggcgccagcacatcctgctgtaaccctacactctccaacttctgattttccttttggtagttctacatttaatctgcaacgaggcactcatctggattttagccaggcagtatcaccatttgcgtataattcacacatgagacatccgtctcctggtgttgccccctggtatacgcagagccntggtccacgccctgcaggcaaatgcaag

SEQ ID NO: 8348 - DNA, 1196 bp, Zea mays
cttgcatgcctgcagacagcaaagttggcccggggcccgggccgacacacgtttctcgagcgcgcgcgacgacaccgacgatcggctcccccaccccaccccagctcatcgtcgccccgtctcctttttcttcagtgccgcacaaagcatgaagggcaaaaacgcgtgagcctggagacagcggcggccagctggtaactgtgtacgtaccagtgatgggaacaggttcgcgcgccgctcgagattccaaccatgattggaacttggaaataccgtttcgagagccgctagatacgactatacgagtaatgttagtactaccttacttttttttatttgatttgtaaaataaaatacgttgatccattattattttattttttatagactaataattaataataaaacgaagactaaatacatttcacaaaacttgtggaatagaccacatcatatataatggattgatgttttaaaccaaacacctagctaattagaatggactagacggtaaaatgagacttaaaactaatcagttcatgtttgctcatgtgatgctaacatgaacatttgtttattatgactaatttgacttaataaatttatctcgctatttagtttttacctatgtaatttgttttatactcgtaattgatatatgacccgaaaaaaattctaaggacatagattgatagggtggaaaggccagtcggcgggctcaatttactccgtctacgtgtagcgcgcgttataactcgatggctgactggcggtggcgggccagcaaccagcgttgcactgtacatattgggctgaacttgattgtttactcttgccgtacgtgttgggctgaaattaggtcgcgatctatttccagaccacatcagcataggtgaggcccaagcaagttttttcagcccagcgttgtgttggggccacttctcagtccactcgacgcttgtcgcgaaacagaaaacaggcaaaccacacacccaggacggtggacggacacccgcgccgccgccgccatggccgacgccgccgcagcagcagcacggtgaggtccattctcccagtcccagtttcctactccatcgatccattcgctccatcccttctaacggcgttccacacccgcgcttccctcgcaggcgcctccgcgccttcaagcggtggatgcgcgcgcacggcgtcgt

SEQ ID NO: 8349 - DNA, 1173 bp, Zea mays
tcttgcatgcctgcagtaaagcctcatgaacacaaaaaggaacatgtatgacacagacttacttcaagaagatgactgtcaaactcagctggcaaatcatatacatatatcagtggcctttttttctgaacaacggccttaacaccaatggtggtactgttcaaagttttcagatctggtaaattcactggtgtctggagccacgagggccagtcatatgcaagcgaatatgctgatgggatactgcaatcaatcccaaaatatccactgtcacactgaagaagatactggatgagattacagcttacagaagtggaaaaacacaaaacaacacaccacattaaaatgttaaatttaacaaaattattccatttcattaaatccctgaaacgtactttacagaaaccaccacggcaatgcccatgtccagagcactggttgatgcagctgcattcagcacgtgtctcacagaactgcccccagagaccatcatatttgcaatcacattcttctttaaacttcactttggatgaatatgcgtcctcagggaccacattacaccatcctaacttactgctgtttgttgtaagtatgttttccaggtcaggtgttttccaatcagtaagctttggaccatcaggttttgcaggtaaactagaaagatggataagagaagattagtagtactttcaaaaaagaaagaagtttagtagtaatattaaagtagctcaaaaacaaataatcagattgagtatcagtgatagtcttacattgttttaaaaccacaagcttctgccacaggacgatctgggtattttgtcccaggcccacaaaagcacattgcccttgttttatcacagtgagctgcacagatggaaactatccattgacctacaggccattctggggagcttggaaggttgcattccaagttcagaacctcctcacatcctttccctgtatcaatgaagccatattgtgaggagtcttgattaggaatacatcactacaaatttaaatgttattgaaatctaacattagcaaggaaacaatatatatgccacctttctacagttcgcactctcatgttcttccattttttaaatgaaatagttgttttttagtaaacccaaaaggccaaaaccatagaaagttcaaagaacaatccattca

SEQ ID NO: 8350 - DNA, 1149 bp, Zea mays
ctcgcaccccggatctctcttagtcgacctgcagctggcggagctcgcgccgggcgcgcttcgtgagaactccatagctgatgagctgtattcgcagtggctcgtgctacccgagacgaccaagctggtatccttttacgcgtcctgtcgccttcctcgcttgcttgctgctttggtttgtgcttaaatttccctggactctgatgttaggctcagacaagttggaaacatcgttcgaacgtttcgtttggtgtcctttgcgctgcggcgcctactggttaggtcgttatttcgtatcgcatttaccagcttgtgacttagatgaagtatgatgatggactttagtagatcaaagtgcagggttcatttagtggtttggtttgtctttattcgtacttatgtttctttgtctatgatcttgttcttggaagctcggcaatgtaaatttcattgtaactgggctgactggtatatttcagtataataccacatgaggctaaatgtcactaccagactaaaagcaacttattgccgggagtgatcttagccttattgaattactttattgttatctacactaccattgttttttaaattttggtcatttggtgacatgagcatgtatcatatttgcaggagatatgtgccatatcagtgacctgattagtgtcgcctaagctgtgtttcacgtcaacaatgatataggaactagcctggtgcatgcgaatcttgtcttagtctgaattcttatttttattgctgtcagaactgtccttgcataaatcagggcatgtgccaaactctaaactgaggcctttctatatagaacaataaacctatgatttcagatgacatgtgattatattttataataaacctatcttatgtttccattttagattgaattagatcgtttattctttattatttatcaattgatgcacaaatacacaaaagatggaaatacgaagaataagagatgtatgacaaaccacaaaaaacaaaacagttcactgatctctatagttcatctatcatctgaagcatttgaagaagaaaaagatgaaaataagaaacttcctgtctcctaaattgttgagttgttgcctgtgctgatgtgcccttatttgtttgtcgctaagcactaga

SEQ ID NO: 8351 - DNA, 1103 bp, Zea mays
atcttgcatgcctgcagcactgacctcctccgcctcctcccctgcctgcccttcatcgagggcaccgccaccgtgccggcggacacctgctgcgccaaccttggcagcatggtgcacgacgagccgcagtgcctctgccaggctctcagcaaccccagcacggcccccgtcgccgtcaacatgacgcgcgtgatggccatgcctcggctctgccgcctcgacctcccgcccgccaccggcgcctgcgcaggtaatactcgtacgcacgcgatctccattacgtgcacggatatttcgcctccccttctcgtgccagggatttggcactcactgtctgaagttgtgtttgatgatgagccctcttgcagttgccggtcttcttccccatggaccatcaccgccgctgccaccgccgccgccgccgcccgcggcggcggtcactccacacgcaagcgccaactccagtgctccagcgaccctcaccacgccagcgacgccaacgccgacgacaccacgtatgataccgtcaccgtcggtgagcagccagacgccgccgcgatacagccgggggtccaagatgatagctcacggcttctctgtcactcttggtttcgtggcattggtgtcagtcctagctttctgaagaattgagcggcattcgtcaggcagttagaattatgtcttagagaaaattagttgcttttctgatgggcgcttgtttcctagagagactagccgcccaggaaaaaatactgtatgtccatcccggttgttcttgttcggctacaagatttgtgttttcagttgcaaactcactgccaccaagtacagaatccactcaactgcacactgatcaatgatccaaatgatcacaatatatatatatatatatataacacggtaaacagctaatcctcttcctctaagcaaagaaggtaggcaactaaacccacaacggggacgaaccgcaccacactcacaagccgagcagcatccgccttcacgttcccaagattgtccccgatcagccacggctggaatacggagtacagaaacatatcccagagaaacgcgtaagcaagccgctccgagaacaggtagct

SEQ ID NO: 8352 - DNA, 1102 bp, Zea mays
gcttccctccaacttggaagaggcttttccttctgctaacccagaatgcagttcagcaagaagccaggagtctgactccaaaaatgctggtttgtccagtggaaatcgcaaagaatccatgaatgtggggcaggggcaacataaaatagccgcgaatggaagggtttgtacaaagacaacaaaggtagagaatatcaagcataacattaatctgtctgaagttacagatgtcgttgacgatagcatttgccaaacagagtatgtatgcgccgattcagaattctacgatttttcagtaagaagatcgctccaaaggttttcacctgggcagatctgggctctctacagtgatatagataaattccccaattactatgcattcatacagaaagtagatctcaagaatgataaagtacaagttagatggcttgatgtctgtcctcaaggagaagtggagaaaagattgtcccaagatcggaccattggcattggaacctttagggttggctacatccacgacatgatgacttacactggtacagatgccttttctcatcttgttgaggccagatctactggcagaaaaggtgaatatgaaatacttcctcgtctcggtgagatatgggcagtttacaaaaattggagcgctggatggactgcgcaggattttgaaaaatgtgaatacgaactggtggagatatttggctatactgattcctccatacaagttcagcttgtgaggaaggtggatggttataagatggtatttatgtcatatagagcagggggtgtgaagacaatacggagggatgagtacccgaagttctctcaccagattccatgctttcacttgacacatgaaaaaggtggcaagcttcgaggctatttggagctcgatcccctatcactaccagaggaatttctctgctgattcgatctgagataaaccttatctacatcaaatctggagcctccggtaatgaagtttctggaacatccacaatttcgtagcactgacgttgttacggtggactcaatctgcacaactaaggcattggcttttggacttttttgctggatggctgtcctgcaggcatgcaag

SEQ ID NO: 8353 - DNA, 870 bp, Zea mays
tgaagtgagacttcagaatggccttgaatgtggaggtgcctacattaagtacatccgccctcaggatgctggatgggatgccaaggagtttgataatgagactccatacactattatgtttggtccagataagtgtggatcaaccaacaaggttcatttcatccttaagcacaagaatcctaagactggaaagtatgttgagcatcatctcaaattcccaccatctgtcccatatgacaagctctctcatgtctacacggctatcttgaagccagacaatgaggtcagaattttggtagatggggaagaaaagaagaaggcgaacttcctttctgctgatgattttgagccagcacttatcccatccaagaccattcctgaccctgatgacaagaagccggaggactgggatgagagagctaaaatccctgatccagatgcagtaaagcctgatgactgggatgaggatgccccgatggaaattgtggatgaggaagccaccaagcctgagggatggttggatgatgaacctgaggagattgatgatcctgaggcagccaagcctgaggactgggacgatgaggaggatggtgaatgggaggcgccaaagattgacaaccccaagtgtgaagaggcacctggatgtggcgagtggaagaggccaatgaagcagaatcctgcttacaagggcaagtggcatgcacctatgattgacaaccccaactacaagggaatctggaagcctcaagagatcccaaccctgagtactttgagcttgacaagcctgactttgatccaattgctgctattgggattgagatccggacaatgcaggatggcatcctgtttgacaaaaatctgaatgctgac

SEQ ID NO: 8354 - DNA, 1133 bp, Zea mays
ttgcatgcctgcagcagcactcaagtttgcctggttcacattttcctccccaaacattgatcctttttgaaaataatcactactaacatgggtcacagccacctcgttgatatcaaaagtttccttcccctcagttccaatacctggtggagagattacagatggttcaacaatagaattagtggaagagttgtgaaaaatgctaatcatcagcatactgactaaccagatgaaggttggagcataggtcttggtgaaagcaatgaccacatatcattgatcaaatcttgagtaccccatagcgcagaatcaacagcatcaccttggtagtaactaggttcaccccaaggagataatgcgatagggctagagtattgtggttcttcttcggctaggaagtcctctattgatcctggcatgtacgaagttccactcctttcttccattaaagaatccagtacatctgacacatctatcgactcaacaccagaggaaggatcaattaacaaattctctcttgtagcggcaatagattcacttccaaaatgttgctctttttgaatagtttcttcacctttaaaatctgatttcgtgtcacctaattccccagttagagcaccagactttggtggtacaaaggcatctggtgagtggacatgtggcttagtccctaaattttcatgtgctgctgaagttaacccagagctgtccgcaacaggttccttaaactcatgcctaggtgtttcactagaaaattcacactctaggatatcaggagatggtacaaggaaaaccttgggttgaggagattgagtaatcaaaccatttgatgggtttgcttcaagtgttcttttctcattcaagatctccattttgcatatgtcggaagcagatgcagaagtagaagttagatttcgaggcactgttgatattaaccctgagttacccatgagaggctgctcaccctcaggtcttggatttggactaggacgtccatacacattatcttggtcatcaccagaagatgaagcgaaaacgctagagagaggaggctgattaagtggagcatttgatgcatctgcttcaagtgttattttcttattcaagatctccatcttgcatgtatcagaggc

SEQ ID NO: 8355 - DNA, 1246 bp, Zea mays
atgcagaattgcaggttgaattgagtaataagtgaatatgatggtgaattggtgattggcaatagcacatacataacaaataactaacacaagctgatcatagactcttcatttaacatgacattttgagtaatgcatccttgtattaaattcgatagactgaacaggataaatcatatttataagctggaaggtctgccaggtagagaaaaatgacatcattcaaatgttcctgaaaacagtttatccaaccaagtatagatgctacaactagcaaattctgaattttgagtagcagggtaacgcggactgttttgcttactgtggtcagcagatggtcttctcctgggggtggatgatgatgggctaggtgatgatcctaaccctgatgatgatgatgatgaggcttccagcaactggaccttgtgatgctcagcaaagctcaccaagttgtcatgcttctgcaaagtgcccctcagcacagatgtatcctaaggcaggagtaagatcagtacatgccctgaaactaactatatacaaataatttgaggatgctttggatcatttgcttgacagatttagggttagggctaggaaactcttaattaatagcatagaaaaactcaatcccaatactactaacataagaagcattataaagatgtgaacctgcactataatcaattttgtatgctacttgatagttactactaacaggaaacggcgctttcatgagaatgtgcaagtgcaatcaggcatctgtgcttcaatcatttttcaatgcaactaaatccccattcaggttacacaactaactatagagggaaacttacaggcaacgcactgaggacaaaaagagcatgtccaaggaaaagagcatcaacatctgtagggcttcataaatagaaattaagaaatatcagtgctccaaatttggcatagcagaacaaaaatataagtgtcagcaagcataaaaacctaacacaaagtacagagaaatatgctggatacaagttaattgaagtgtacctattatcaaatagaaagacttgatcccctaatctgaaagacaatgactcataagcagcacttgccttcaggtatatctgtttaaatagaaaattgcattacaagctactaatgtgtcaaccaaaaaacaaaaaaaggctaggacaataataggtagggagtagcaaacctcctgttcttttgctgcaggtagactctaaaggatgccccgggtacc

SEQ ID NO: 8356 - DNA, 1132 bp, Zea mays
gatccttgcatgcctgcagctaatgtgaatataaccaacctaaagatatcaggccgttgatcataatcaacatgatgaccattattctctctccacttggatgctgtacaattttgggtgccacatatcaacaacaacaaagaaggggggagataattgggaaaataacactaagaaaatctatgaagtttcaaagaaacaaaggtggcatggaatagtaaacacttggataaaaaaaattgacaaatgcatacctaaaccaagatctataaggtaaagcttcttatcttcaggcgatccaggctgaccaagcagaaaattctctggtttcacatcaccatgcacaaacctggcaaacagatgatcttagtgtaaatcaacagtaatacatacatctaagaacgttaggttcaaaatagctaattttagctcaccctttagaatggagcttctcaagaattgatatgctctctacagcaatgcaagcagccatatttggagtcatcctgtttgagattgttgactcgtttagtctagaagctgatacatgagtgacaaaagataccataaaaaagaatagaagatacttacgcctgccccatcgaattccacacatcccaaaggctgggaccaagcatatccattacctgaaaaaaaagttaagtgaataaacattgttgagctgcaatgaaataaagtaataatcgaactcacaagtatatagtattcgccctgacgacccttgtagtggaccgatggtatgccatagcaaccattgagagtgctagcaaacaatgccaatagtcagaaagaaatagtgcccacgacaaaggaaagacaacaggatgagcaacatacttataaacttgccactcatatggggggccataattgcatcctttactgttacgatgctcgaatttcaatgcaacctacaaaaaattacaattgattggatttatgtaagggaaaaatgaatcaaattcataaaaggttaagtgacaaacctcatatgcatcaggaccagtgcgagcagcaccaccagaaacccttcgaccaacatacacctgaccaaaaccacctttacctaacttcctgtcagttatgtactctggagaattacctacttgaa

SEQ ID NO: 8357 - DNA, 1213 bp, Zea mays
gagcacaggcacacacaacattagcgttgcattgcagcttccattactgagaaaacacacgcacaacagcacagactcgaggcagaagtcatacctgatagcaggagataagcgaggtgacgaacccaaaggctcctgtcactctcggagtgaccttcttgggcgccagctgaagaagcccgacggccacgaccacgtccatggccgccttgaccagggccaggagccgttcatctgactgcctcattttgtcctggtactgctcgttctgagaatggccatgtgataaacactcaaacaggtggaaaatttagctgcatatacactccatgccctcacctcaaacagtcagtggcagaaacgaaagtgtgtagtatatgtgtatgcacctcatatttatctgtgtccctcagctctcttgcaagcttcctcatcgatctcgatagccttttaagctctccaagctgcacagtggcaggcacgcgatcagtaccatcaccacttaggtcaggtgtagaaaaccctgaagcatatatggatgtgaagaaactgaaactgtgttgtatacatacctcaactagacctgcacaggcagaagaagccatccagcagtacagggataacctggcaacgcggtccgtcgcctccttgttctaccaacggggggaaaaaaagcaagaacaaatcagtcgaaaggaaaaaaaaatgcatgcacaaagcaaccaagcctttccatcgggacaaaccttgacgatccccgttcgtccgagccacacaaactgatccaagaacaagaacgtcgaaagcagcgcgtttttggactgcaatcgtagaagaagaacccgcaggttaattcgtttcgaaccctgtgattcctaaacgggggggatttcttgatgaacagtgtactgtgtggaggggagaagtcgatttactttgccaagcagaacgagggtgagcggagtccctttggccggcgggctgataagagcatgcagatcattgacccactggacattacatgcgacatcaagcggttattctacaccgagaacagttgagctggtacgacggggagaagaacacagcacatctgaatctggactgaccttgaggagccggaagactttgcgagccaaggtggtcgatctgtcgacctcctgcgcagtgccaggctgcccgttgcttacgaacttggagccgtactggatcg

SEQ ID NO: 8358 - DNA, 842 bp, Zea mays
aagctcctcaaccctagcttcgcgccgcacgccatcggggaggtggacctcaacaagtgcgaaccatgggatctcccaagtaagctgctatagctatactgtacacacatacatacatacatacatatatacagatgcatgatttgtactgtgcatacaaacatacaagctggatgatgagaagtaccgtagttcttgcaagtaaattaattgcgtcgtttataggcaaggcgaagatgggggaggaggattccaaggagtggtacttcttctgccgcaagggcatgaaatacccgacgggcacgcgggcgaaccgcgccaccaaggagggatactggaaggccacgggcaaggacagggagatcttcttcaagccagcagctgggcacgacgacgtcgaccgccgtgagcagctggtggggatgaagaagacgctggtgttctacacgggcagggctccaaggggcaccaagaccaactgggtgatgcacgagttccgcctcatcgagggcaagggcaagtactccaggcaccgcaccaccaacgacgacctactactacgcttcaaccccaaggtaacaacacgacaattcctcttgcttaattacttggtcgatcgtgttgaaaactaaaaccgtgtctttttttttttgttccggctttattttatatattgtgttcaggatgaatgggtcgtgtgcaaggtgcaccacaaagggggccaacatgatgccagcgccgccaaggccgctggcggcggcggagaggagcagcactactcgtccgccgccggaacgcccaacgtcagctccgtcgagaccggcggcggcgacgacaacgac

SEQ ID NO: 8359 - DNA, 1134 bp, Zea mays
cttgcatgcctgcaggtggggttctatggcaagacgtgcccggcggccgaaggcgtcatcagcgacatcgtcaacaacgaaatcgctatggaccggggcatctcccctggcctcattcgcctcttctttcacgactgcttcatcacggtaactagctagctagttaacactcacatttgctcatgcctatgctgcaatgcaagtgcaaccgcaccgtgagctggttctcgtgcagggttgcgacgcttccattctcctggacgagtcgcccgccggcgacgtcccagagaaggagtcgtccgccaacggcttcaccctggtcgggctcagaaccatcgacatcgccaagtccaccgtagagggcatgtgccccggcaaggtctcgtgcgcagacatcctggccttcgcggcgcgcgacgccgccgtggccgcgggcctcccgagatacgaggtcgcggcggggcgccgcgacggcatgcgctcgaacatggacgacctcccgggcaacttccccgtgccgggccaccacgtgccgcgcctcaccgagctcttcagccagcgggggctctcccaggaggacctcgtcctgctctccggcgcgcactccatcggcggcgcgcactgcttcatgttctccaaccgcatctacaacttctcccaggacgccgacgtcgaccccacgctggacccggagtacgccaagtggctgcgccagatgtgcccgccgcggcagcccggcgacgaccccgagcaagcgcccaaggtgaagttcgacgcgcagacgggggagcggctcgacgtcgcgtactactccgagctgctcgcccgccgcggcctgctcacctcggacaacgccctcatcgaggacccgcagacgagggcgatggtggagaacttcgcccggaacgagccactgtggcagcagaagttttcccaggcgatgcagaaggtcgggatgcttgacgtgctcatcggcgagggcaagggccaggtgaggaagcagtgccgcctggtgaacgggcaggagaaggagcagaagcagcagcagccaccggaggagcaggaggagcagcagccaccggagctggaggaggaggagcagcaacagccgcatcagccacagcttccatggtt

SEQ ID NO: 8360 - DNA, 734 bp, Zea mays
cttgcatgcctgcagtttgttttttctctagctgatggtgaggttaaagagttagtgccatgtttcagacacacccaggaataatgtgaaatcgactattttcaattgagcaagtttgttatctatgtattttatttaggagtatcttaaactcaacagacagttatggacaagatgcatttgtatagtttgaccttagccaggcttccctttggcttgtaaggtctggagactggagagacaatggatttgaactgtcatagtgtcatttgacaaagtggcagtattcttttgcaattggatgtttcatttaccatgtactttgctactcccttagactccaaatagaagtctagttgtactcatggacaggaattataatgatgtaaatagtattgcctgatcaatcaacattacgagataggtgatttgcatgtgagcctatggatcaggcaaagggatattaaggaaagtttggtgcacttgtattcaggaatagtgattacaaggctgcacagatattagaaacagtttgaaactgttgccaagctaaactgatgctatccttcactgcttcaaagatgccacacaagaaataataagttgagtgtgtgtctttctctccataacctttgcttttccatacatttgtctttccttggtagtttggtacctgaataccttatgtgactggttgccaaatttgcatcctaaaagtacctttagattatcat

SEQ ID NO: 8361 - DNA, 1068 bp, Zea mays
atatcttgttgcaattcaatattacaccagaattggtggcaaggtgtctgttaatttgataaagtatgaaaacaaccaaggagaagagtctagttccgctagtttagtttataaggtaaataccatgaagtgaaaaatgatttgttctttatttgttggcctctcaccttatttcattttctccaaattcaggcctttggtctttactttatgcagtcatatattgggttattttaccatgcttctttgcatcgtgatatactggccctccggcgagtcctcatccagcgtctcattgtgtaccaggcatgtctgcaacataattgttttgctgttgaatatgtttgtaccgtagtttcctatttacgatatgttttccttttttcaggtattagaaaatctaattgagaattccattccttaccttaagtacagctacaaaaagtacatagctgttcagtaagtttcacatgaactcttgtccttatacttattattcccagatcaatagagtaatatacaagaattctctcccatcttgtagcaagaaaaagcatgagaaagaatcaccagtgggtaggtcagtccggttatcaacaagagtggagaaagagtatttaaaaccctcttatactgcgagcattggagcagaacttgaagacggtttatttgatggtaaatatgtccttttcggttcttttaatagtcactctggatgcagttcatatataacacctgtgcttagcatttgcagtttgaaagcaaatgatggtgtttgtgcttatattattgaatccactacagactttctggagctggctcttcagtttggcatgatcatgatgtttgcctgtgcatttccattgatattctgctttgcagctctggtatggatctctatcactaaatcactaatgcactatgttgtttagcctctcttgtgtttgttgctttgatgtaactctgttaatgttgttgtgaactacttggactacagaacaatgttactgaaatcagagcagatgcattaaagttgctagtcatgttgaaaagacctgagccgcgtga

SEQ ID NO: 8362 - DNA, 330 bp, Zea mays
aaataaacgggattctatatcatatctacatacatcaagcaaatccttgagaattttgacctcctggcagactaaagtgggcaaattcaaacacaaaatgagggcagaaatgagacgtgcttcaagtgaattgggattggaggaacgcagcatctaaaaaaatattaaacataatccaaaaagatatgaagaatcatgcagattagcagatgcaacacaattaactccattagttgatgtaacagaatagttacctcggttcttccctgcaggataggtttcccacgatacatctcggcaaatacacacccaagactccacaaatcgaca

SEQ ID NO: 8363 - DNA, 816 bp, Zea mays
tgcatcaaccagtgctctggacatgggcattgccgtggtggtttctgtaaagtacgtttcagggatttaatgaaatggaataattttgttaaatttaacattttaatgtggtgtgttgttttgtgtttttccacttctgtaagctgtaatctcatccagtatcttcttcagtgtgacagtggatattttgggattgattgcagtatcccatcagcatattcgcttgcatatgactggccctcgtggctccagacaccagtgaatttaccagatctgaaaactttgaacagtaccaccattggtgttaaggccgttgttcagaaaaaaaggccactgatatatgtatatgatttgccagtgacaggagcagtctcttgttcctgataacaaatgatggataagcagttgagaattgagatccgccatagtggtactgctacacggggatatttatgcaaacgaaacagcattgggtagttacccgtcattgttgacagcaagattgaacagagccattgtagcaacctcctgagattgcacacctcctctgtggatagccatcttcagaaaatggattagtggctcagtaataccattagcacctgcatagttccgaagttcgtcgtcgttcttcaacaggatcctgatctgctcaaccaacttatgtttctcactcatgctctcagcatcgttcttgttcagcacatggagccactgttcacatctctcactgacaggtacatcgtctttggagtcttggtgagagcccttgcccttctccacgtccacggagtcttcaaccccacatgcgtcaga

SEQ ID NO: 8364 - DNA, 434 bp, Zea mays
tgttccttgtgactgacatcttttcttcacacgatctcactgcacaaagatacaatgtatgtactaattatgcttgaaagaatttctggtactcaaatctcgatgacagaaacaaacgcaatgtattaaaatctctgaaggcatactttctaaccaaagggaaaaacaattacctgcactgtgggcagcttgctgtcggtaattaatatccatatcccggttggcatgtctgagcgtaagcgtagggatactgaggagaccaaacgaagcagtcgcgtccgaacccgccgctgctgttcctttgagcctgccaatatttatgcatgtaaacaacacacagcttggatggaaagtagcaaataaacaagcgacgggaattacctgcttgtcagcagaagggtaaccccacgaaagttttatggctttacctccca

SEQ ID NO: 8365 - DNA, 388 bp, Zea mays
tgacgaatcttgcacgtggggattgctttcagaatgatcaggtgcttttttcaagtgatgctttcagtgatgaattcaggcttagagcagtactgctaccactttttacctgagaaatcttgagtttttggtctttctttcttggtctgttttcctcatttatatagtcacctaaaatactgttttgcactatagactatactatttacagagtgaagtttgaatataaagataattagataaagatgggtaagctgctggagataattttattattgttttgaatctggtcgagttcctggttcctagtgcttgcacggcgcaattgcttgctactaacaggccaatatttcttgggttcagaggaatgcttgatcccaaacttgca

SEQ ID NO: 8366 - DNA, 542 bp, Zea mays
ccatgttaccctcgatgggcaccgaacaaggtgtctccggtgagctgcaagcgggtaatccgagtggacgtccgtgccccgttcgttgggggtcggctaggggcccagaggcacgcccaaaagtacctgcgggtgatttgccggacccggtcccctggcgacggggtccgagggctcgatgcctccctccgatgggattccgttacaagatcgttcccgttggtctcaaaaatgtcctagggtacctcgggagcgcagcccgagccttggttatgtatcgaacgtacccctggtcatccctcgctcggtgtctgaggcggctgtcgaacccttcgggggccagtctacgaacccctgatcagtaatgggcgcggagcccgagtggcctgaggcggccgttgaaccctttcgaggggccggccttcgaacctctgaccagtagtgggtgtcgggcccacgcgatctgaggcgactgttgaacccttccgaggggccagccttcgaacctctgatcagtagggggctcggggcccgcttccttc

SEQ ID NO: 8367 - DNA, 803 bp, Zea mays
ttcggatcatccgccaagcttcagatcattgctcttcggcttcgtcatcctgtacataacaaagcgttataaggtaaattcaagtttcaaggaaaaggtaagcacaaggtatgagtttattaccggcttaaggtgacttcgagcttcgtcaccagccaagcttcgtccacccttcacccaaattttagttacgaatatgttcccaatgcttcgggccaggccggggatgtcattcaagtccgctggcaataagctgaaattcggcctgtttacaatattcccgtgcgtgcaaccagccttcataaaagcaacagttgtgccacgagaagctagcagagcgcagaagtcaccatgcccagctatgacttcatcaagagcatcaacttcgccttcaatatgatcaaagatgcttgacaggttttcagctgtttccacgatgcgttcccctcccccctcatctcgcttacgtgtgggccctcccagccctgcttgtcttccagccccttgcccgcatgcacgaatcggatgacgacgacgacgccatgagaaagctgaagcgccgaccgccacttcgtgactgctgctctgctcctcgactcccggcgcctgcgccgtagagaagtcgaccgtccgtcaccctccccactcgcgcgtatttccctctcgtctttcccattgttgctcgccatcaatggcaggtgtcggccatcgccatgcccagtctttgctgttcgccggaagtctcctacgctcgccatcgtcgccatacccttcgccacgaccgtcttctcccagccagccca

SEQ ID NO: 8368 - DNA, 764 bp, Zea mays
tgcccccgccccgtataaaaaacgcaccaccagtggcggccaagccatccactgccccccgcgcatcgccatggctctcgccgtccgcacgcctcggttccagcctcgaccggcctccatttctgcgcccacaacacccgcatcgacctccctcgccgccgggaacgcgaggccccgcccctgcgccggcgccgccgttcgcgcctcgcccttcaccgaggccacctcctcctcgcgctaccgccgcgacgcctggtcatacgccgccgatggctcctccaactccgcatccccgtcctccgctgccgctgctgccgcgggccgtcgggatgacgagatcgcgctgcagtggaccacgccaaggcgaggctggcgtccaaggcccgcgacatcaaggatgcagcacagcaccgcatcgaccaggcgcaggggtcttgagagaagaaccacactcgagcggaccgcgcgcgcgacctccttgaaccactgccggcgcggcggcatatggcccttaaaggcggtggctgctgctacgtacgctgccgtagagtctcggtcgccgcgatagctctagctagtcgtttatgtgttgtgctttgtgtgtgcatgcttgtgtctgggggcatgcagtgcagtgcagtactatatgctgtatgcgtctctctttgatcggagaggcggatgtacagcatgctcgatatgtctagtttggatgtcatgtttatgatgaggaataaagatgcagtgtctgagggtaccgagct

SEQ ID NO: 8369 - DNA, 366 bp, Zea mays
  unsure (1)..(366): unsure at all n locations
tggatgccaacgctgcagtcgacgggcccttggctcttgcagctctgcgtcctgatggcgcatgtctgtttgcccaggcagacgaagttcgacttgccggagcaagcgccacagccgtccttcttccagtgcaagttttggagtctgcctttgttgaactcaagtacctacagaagaatcgtcagnngtcngcaataagattcagaacttctctgttgtgtgtttagatatgctggacatgatagtgtgtttgtctcgaatcgtaccagtgtgaagctggacactgtgactgaggtgttggatacaaatatcggaatagatctagctgcatacttcctgccggcaaatgctaccatgaatccacca

SEQ ID NO: 8370 - DNA, 381 bp, Zea mays
tgcatacctgctcgcgcagtacaccccgacggccatcaccgccatcccatagatgttcgtggtaaccaagcggaatggggtcgagaccaccgcggcgagaggtccaccgatgatggagatagcctgcccgctctgcccgacaacgccctgctcagcaacaagaaggccagtcttgcagtatatcgcgaagtcctcgcagttgctcttgaacaggttgtagcacctgaaaccgttgctcagcaggtatctggcgcggcgagccaccgtgtcgtcagggtcagagggagcgagcgtgcacgtccctcctcgcgctttggcgaggaagagcgccgggttgactgcgtactcgaaacggtagagagcacccccagctaggaagca

SEQ ID NO: 8371 - DNA, 347 bp, Zea mays
tgcagcaccttggggcagccgaacacaaccgtaatactaagcttgagaaaatttagtttataatccatctgttctaatataagtcgttctgatttttctaggtacatagtttttgccttttacactatatctatatacatagccagaatgacttataagttggaatggagggagtatgtgcaaaagaaaatattgtcctgaaactcctatgtctcctctcttccctacatatttctggtcatgtggggcacatggggatgggtcgttccggtggtagttgatgggtgtttggtaagggtgtttatggaactttagaaaagtggaagggggtataatgtcctatttca

SEQ ID NO: 8372 - DNA, 426 bp, Zea mays
tggtgccggcacgccggagttgggcgtcggcagtgggctgtgggccgccttgggcagaagctgggtacagtacaggtactcctacctggctggctgccaggcagcgcagaaaagcagtaggcggcgtacggcttgtcgtgtgcatggcacattgatgtcgtggccagtggcccgggtccgggacgctacacggtcgttgtgcgtttaccgtgactcctgacgttagaaaacgcctctgggccccaagcatgtgttgagtatggtagccacggctccgtgtccgatcattctttaactgacgccacggtccaatgctgtctttggaggcagacagactaccaatcagatttcgacaggcaccgccccaaattcccccaccggggccggttccaccaccatcgatcgctgcactgtggacttgctgca

SEQ ID NO: 8373 - DNA, 903 bp, Zea mays
tggagatggaggccaatgaagcaggaagcgagggagaagaggctcccgaggagctaggaccagcccctggtgccaatgggactacctccgcgatgcctccttcacccgtatccagtgtcgcttccaccgctcagggttaagcagtcgcgttgacatttctttaggcggatagaaacctatgcgagcttagtagtatcaccttttggactaggcttatgggtactttcccctgattgatgtaaccctgtaaacttttgatatatgtgggatccttgtcaccatgttatcttcattttcgaacctaatattatgattatggcatttttccttccatatgagatgatatcttgtcgttcggaaatatgagtcgggataacattggcgacaatctctgttttcagatggcagctaggcagcgtcgcgggcagaacgagcaggttcccctgccacctcctccagctcccacagtgcaggagctgatggcccagcagaatgagattctgcgacagctcttgcagcgccagccccaccctcagcatcatggtggaggccagcatcagcgacctccggctatggcaacttaccaagagtttctgagcacgcagccgcccttgttcaccaaggcagaggatccgttggacgccgacgtgtggttacgcatcatggagtccaagtttcccctcctcacaggagactgccctgatgaggccaaggctcgcttcgccgcacagcagcttcgtggccctgctcaaacttggtaggaccacttccgtgctatgctccccgctaatcatgaagtttcttgggaggaattcaagactgctttcagaggacaccacatcccagctgacattcttgatcggaagttgaatgaatttctggcccttaatcaaggaacccgca

SEQ ID NO: 8374 - DNA, 413 bp, Zea mays
tgatgggtgtgggaggactcaccatatctcatgtcaaaagccatctgcaggtcctctctcttgctcttggtctttggattctgttcctcatttttccttcacctatctacaatagctaactaagatggagtatatatatatatatattcctttttttatgagagtgcgcactactgactgaatatagttttattcttctgaatgtgtcgaacagatgtacaggaacatgagaaatgatcttggaatgcaaggtacatactaccctaattaagtagctcaggcacagctagctcttctatgttcccagaaacgttagggaaaactgaaaagaaagcgtcaggctattcgctgcagcttttttgcagctcaaaaaaaaaacagccattgtacagtgctagcagagagatattaca

SEQ ID NO: 8375 - DNA, 445 bp, Zea mays
tgctgcatacatacaaatggaattaaaggtcttttctctccaagaggcggcaagatcggacagaggtagaagagaggagtggggtgtccgactctgtagcctgtggtgggatcacacaatttatgctgcctcccaatctcactgcatctgctcatggctaatctgtgcttggccaggcaaaagccaagccatgctaccctgtgcttatctactgtggtgttgtagttgtagggagggagggcagcaaagaaagcaagcaagaaagaagccgattccacgggtggttaaggttttggattaaaggagagaggtgcagagaaaaaaaaaggcaatcttactcttacgctctgtgtccacatcacttccgatcatgccgtgatcaacagatgtacgggaggtgccatggataagggcctcctccaactcaccaaagtaataaggagca

SEQ ID NO: 8376 - DNA, 1329 bp, Zea mays
attgaattgcggaaattcggaggtctggggttccccccaaaaggttcaaattaaagttccgaggtttcttccccctcaagtcagctttttgaaagaacccgacaagggactttgggttgggaccccatttttcttagttaatgcaagcccagaattaacccgaaaagcttggaagtgaaaaaaaagtttcaaagccatgctttcaaaggggcacccatataccaagcgggaattatggatccaaaagctcaagaagtttctggcactccctcagggcaacaggacagtgttgcagtatgttcaggcttttaatgacctgtgccagtataccgggtttcatgcagacacgcacgagaagaagagagacaggttcaggaggtggctcagcaataagttccgtgaccgtctcaactccgtcagggccaacagttataatgagttggtcaacatggccatctcccaggaggactgtatcacagctcgtcaggcataaaaagaagaggaagacccctgtggcagaaccttcaggtcagccacagcgtttcaggatgtgctgcttcctatgcaagctactccgaaaattttcctcaaggcgctctgcctcaaactcagtagcatacaagtggaaaacaatggtctacacgagaacatccttaagcttggccttctggtcagcggttagggttttcgggaataacacctcgaatgtcacatacaggtcacctttcttgttgctttggtatagtggcatgccttcacctttgaacttcctgatctccttcggtttggtgatgccctgtgaattaaggccaaaattgagccggtctggtctgttgcagatgacaaaaatcatgttgacgtatgcctgcctttaccttggtgccaatttctaccagatggttgtcaagatgcttgattgtcttctcgaaaccaaccagagcttgcagctggatatctgtttgcaaagttatgttcttccaaagaatcacagtactgcataggccatccttttcatgaacaatcagtaaccatgttcttttagcatgtttggggatagctcatgatgaataggaagaagggtttaacattacaatgcgagtaatgaatgtgataatatgatttattggaacagcgaattgctagttgcacaaattgaccagaactagtaacaaatgtgtttgatgtacataggcaagctgaggcctttacctatcctgaatctgatcttaaataaactgttctgtataaacaaaaagcatggaacgatgcggtgttcaccttggagcaactcgttcttgaatcagatggggggctcacaaccctgtcaat

SEQ ID NO: 8377 - DNA, 685 bp, Zea mays
caacctccggccggggaagtgcatcatctaccccagggcttccagcaccgcatcgacgacgatgtcaggacgaggccgccacccgcttccagtggagtcggccagaacctggctgcagcggcaatgctcctccgagcgatgccggagccatcaaccaccgaggggcggcgaatccagggagagctcaagaatctcctgtaagatgccgcggtccgacgggccgaaagctctgcctcctgaaggcaggggtaccccccggagcatcgcgccgcgacttcccgattcatgcgggaagcctcggtccacaccgggcgcacgcgcaacacagcgcctgcggccccgggccacctcggcaacgagcaccaccaccgcaaccgtcgagcccacctcgacgaaagggtgcgccgaggctaccaccccaggcgtgggggacgctacgacagcggggaggatcggagtccctcgcccgaaccacccggtccgcaggccttcagccgagccatccgacgggcgccgttcccgacccggttctgactcccgactactatcacaaagtactcgggggaaacgagaccggaactgtggctcgcggactaccgcctggcctgccaactgggtggaacgaacgacgacaacctcatcatccgcaacctccccctgttcctctccgacaccgctcgcgcct

SEQ ID NO: 8378 - DNA, 386 bp, Zea mays
attcgagctcggtacccctgttactgtccggttggagagcctctccctgaggctccggaagctcccgtcctttcccatctcgtcgaccacgaacactgtgccatcgtccaggttcttgaacacgcactccggctcctcttccgtgccagcgccgtcgccgccggaggctgtcggctcccctcccatgctcgcaaaggtagggacggccgagaacagctcggcgctggggcttgccggtaggatttcttctctggcctcaggcctcgagcacgtctcctcgccgggccgcgcgccgtgggggctcggatccatgaggcccagggacttgacgaacctctggcggcgctcgtggacgctgcccgggtcccggacccagacctcgagca

SEQ ID NO: 8379 - DNA, 362 bp, Zea mays
tgaacagcagtcagcatttcaaatacgaaagactggaactgtggagcaagtaacaacactcacatcatttctaacacttggaattgctaaattctcagcattcttgattccaagggtagtgagctcccgtagagatgtctgtttcagaatgcaggctcatcagttagaatcaatcagagccagacacaaccatcaaatgctactgcattgtaaaaattgcacgagcaaaacgcatgacaggagtatgcatcctgcaaacacgaagcgctcaatcattgatgcctgagaagatgcagcactgaccgtccggcgcgacacatagggctgcgagccccaccgcttggcccatccgctctctctca

SEQ ID NO: 8380 - DNA, 397 bp, Zea mays
cccccgaaccaattttcatttccttggcaagctaataaagagttcatcgtcgatcagtcccgctgcatggtttcgtcctctccgcaagcaaataaatttcctctccgcaagcaaatttcctcgccctcctcttcgtgcatgactcctcatgtgctattagtcctagtgattctcctgtacctcgtcagaaccctcaggccgtggcggagccggaggaacagcacatgctgcaccccttcgctcccgccggggcctgtgccatggcccgtcgttggcaacctgccggagatgatgctgagcgacaagccggcgttccactggatccaccatatcatgaaggaggcgggaaccgacatcgcctgcatcaaactgggcggtgtccacgtcatccccatca

SEQ ID NO: 8381 - DNA, 379 bp, Zea mays
tgcatgcgattgcgagtagtgtcggcttgccaagccagcgggatgttgactcgccttcgcctctcatcatcatgacagccaccgcgcgtccggcctgcctgcttcggcttggccatgcaagttgctgatatgccactaaccaaccactggccagcttcggatgccctcttgttgacagagaactaatcctccgccggtacctctatttcctctccgagatttggacgcgacgatggcagccgcgtttcgcacagcaagctgatcgacagacggagctgaggttgcaccggacacacatggcgtgcgtgcgtgctcggcgtccaggcatgcatggcgggccggcgcgacctcccccgcccggcctcagtcggcatcgtca

SEQ ID NO: 8382 - DNA, 363 bp, Zea mays
tgccagcatctctgttaatagagttccagaaaatgctaagggctaagcaagcgactgagtggcacctagcactcagtcaacaaacacggagacaacaggaatgcttcaaattgaagatattaacatttcaataaaaagggcaaacccagtgccagaggctcccacatgagtggggtctggagaagggataaaccaaggcaagccttcccccagcaaatgcggagagcagcttcaaacccgcaacttggtgacttcgtgagacagctctcaccactgcaccaggcctgcccttctatattaacacttcaatgtttatgaataatgagtgcattcgtaagcatgctcaagtcaccagccttgagg

SEQ ID NO: 8383 - DNA, 475 bp, Zea mays
aaaccccattgcaaagtgggccgctctccctcgccttctccagtctccactccacccccgttcacctcccaattcccaagagaccaatgcctcctaatgcaaagccctcctctgctccgcgctgtgtctgctctgctccgctccgaccaatgcgcgattagcgccgcccgcgagatcgatcgctgcgcggccacggactgcccgacgccatgccgtcctcgcaaggggagccggtgcccccgtggctcaagtccctcccactggcgcccgagttccgccccaccgcggccgagttcgctgaccccatcgcctacctcctcaaggtcgagcccgtcgcggcgcccttcggtatctgcaagatcgtgccaccgctcccgccgccgcccaagcggaccacgctcggtaacctctcccgttccttcgccgcgctccacccggacgaccccaccccgacattccccacccggcaccagca

SEQ ID NO: 8384 - DNA, 376 bp, Zea mays
tgctgaggtatttggtgttgggtcatgtcagcactatagtgatcttaatctttttcgttcaaggcttggcttgaacttggtcggtttgttctcgaaccaaagagattttgcgcagtctcgtggtaccatccaacaacagcacacgctcagccacttttgattctaaaattgtggaaagaaacaactgtgatatgctattagtatttagtgaatactaatcttgacctgattgacaaccggcatatatatgttccacaaagatgggttttcggtttggtttggtgggcgttggcgcgagccggcaaaaagcggacggggcacacccacacggggtcagaagctgacgagagggaccaccagcaggcagcaggcgtca

SEQ ID NO: 8385 - DNA, 411 bp, Zea mays
tgatgccgctagtaataatggtttcacttttaccgtggcgaagaacggaatttttgactagctgtgtgtatggtggtccagaagcctggctattactagcaactgtttactgcaaaaaccatgattatggcatcagggatatgcgggaattttgtgaatgtttgctggcaccaccactgctgctctgttaaataccaaaagctatctcgtcgcgaacaggacacgaaagcgcttcaaaaaagaaataaattcacgaatcacgggataagcgatcagcggggagtggagtaccactgtaaatgcgcatgcagcagcagcagtaggaggaggactggtaatttgttggcgtgctgcgtgcgtagcgtagcagcagtacctttgtttgcaggcgccgcacgtggggtgtcctca

SEQ ID NO: 8386 - DNA, 396 bp, Zea mays
aaccgcagactaaaatattgaaggcaatgtcgtttagtatggtctataaacacctcacctgaaccaatttctagaacacatatttatccacatgtttttataaaaaaagagaagaaaaattatatttttcttgcaccattttatatccccagcattatctcttcccatcgtcactcctctcattcaatgggtagcgctctttgattttttttagccaccgctttgcacttctgcattatccctcgacgccgctttaatcccagttccatctctcgtagctgtacttggtcttatccgcgtacagagttcgttcatctctccaacacgacatccctctccagctcattccagcgcactgcaccttttgctcgatgtcatccccagctccttcaagca

SEQ ID NO: 8387 - DNA, 740 bp, Zea mays
tggaacagtatatgcccatccctctacacctcctgtatgcactttttatgcctaacaaatttgacctacatgctagctaatgtacacacacacacccttttatccttgtttggctgacatatttttttgcatggtgagtaaattactggcaggccatgcatccatttggccattatcctatgccaacaaatgggcatgctgaaactcatgtaagtactaactgtgctattcccttttggccatcaccgtttcatgtaatcctgaaatatacctttcagggagctgcgccaagcgctccggaaatgaatggtgcgtcttttccaaggtgaacagctcattatcaaagtcagtggctgcctctcccaagtagtggtcgacggcccctgctccatccctccaaccccctgctgtgctctacgtaaggaggaagaagaagaccccatggtgcctatgacaagtgggtccgaggcgagatgtgagtacacaaaatcacagatttttgtgttatgttctaaaattcatatcttgagtttggtagctccaaaaatcacgaaatttgttttgttggcttttttatgaaatgatctaactattagatctataggttgacatgttttagtggaaaattttttctgtagaaattcatatttaaaaactggtatagagaataaataaacttgattctctccataattttatttataaaaatccaaaaatgatgaaacctaattttgtagtca

SEQ ID NO: 8388 - DNA, 358 bp, Zea mays
tgatgttcttgttgctgccaacacaacaacagaagtttcaatgagggttgtgtgacctaagacgaaggtataagtgttttataagaccttaagttttttctttcacaagttatattttatctaccattattcccttctacctaagcatatatctttaatatatatttaagtgtcaacctaactaattatttcctttgtcatattgtgggtcattcttcaatggagacacattcttcattgaagatgcattctcatttatttgtgcatcagcatgatgaatccaccacaattatttttctgaaatatcttcttgttgttcatcagtttcagtacctaggatgaagtttcagagctatca

SEQ ID NO: 8389 - DNA, 406 bp, Zea mays
tgcacgaatagtccaacaccgagcagaccagacagtcagagcaatgcacgcaagacagatcactaggtgtcagacaagagagagagattaataaaaaaaagattcgattttgatgtgtatgaaccttcagccgtggcaaagatgaaaccgatggccttgtgggcgacgtggccgccggcgccggcgccggcgccgccgtgcgggtggacccgggaggagaagcatgggaggaagtccaagggcgtgacggcgcccatgcgccatccgagcgtggacagcaccagcagctccatccgccggatggacgccgagtcgaaatcgtagccgccggcgtggaagtccgacagcgccggcacctggcactcctccatcttggcggccacggacacacacgccacggacagca

SEQ ID NO: 8390 - DNA, 378 bp, Zea mays
tgagctgtaccctgtctgcaactagcacaacaggcaaaacgttgcatcatttctgtatttttggtttggaacaatatggatgcgattatgttccctactgtaatttgctcatatacctaaatcgaggtttattggttgccttggtaggttaacagtaggcatttgtatacgttttgctctttttttatgtaaagttcatcttagtttcacagcggatctctcggtttgctgatcaaagcgttgtcctccgatgcagcaatgatgggaacagagtgcatcatggccacactcggcggggatcctgaaccctcaattccacctggattcggaccttttgttgccctcgcgctacagggcatccaaaacaatgccaaatca

SEQ ID NO: 8391 - DNA, 753 bp, Zea mays
caagtgatccccctaggcctgcgcctcacgttgacatccttcgggagctagctgtggtcccagtccctgcggggggtcaggacgcacagctcgagcaaatccacgagatgcaggccaagctcgacgagggagcaggaacacttgagcagttccggcagaacatcgggcaggaatgggcagaccaagctccggccggagaagcgcgtcatctacccctgggcatccagcaccgcattgccgacgacgtcagggcaaggtcgccaccggcttccagtggggtcggccagaacctggctgcagcagcaatactactccgctcgatgccggaaccatcgaccaccgaatggcggcgtatctgcaaggtgttcgtggacgacgagggtggctccggtgccggagcgttcaggcggtgcccggagtgcaacgagaacgggctagtgaaatgcgccgtttgctagattagttttgccatctttttttttttgagagagagtttgtgtggaattttttataaccccatctccatccttgtttgacgaccagtttcgatcgtgatcgacatcttgtacagatcagaaagaaaacaaacagttctttggatttcgatgagtctcagagtgcaagaccaacaaatgttcgagccgccggctctagcacggagtcgaccactcaaccgttacctgaggcaacgtgaaagtatgaaccgatgcctgtgttttgtgtgtgtgatcgtgtgaatcctaggactaacca

SEQ ID NO: 8392 - DNA, 422 bp, Zea mays
tgctactgctaggaagcgacgcgatcgatggatccgtcgtcatccatgcttatatgtatgaatgaatgacgacggccagggccaggtcattaacagtcgctcgcgcgtggctgacaggtgggcgacggcgacacggaccactactgctggcagcggccggaggacatgacgacgtcgcggcaggcgtaccgcatcgacaaggacagcccgggctccgacctggccggcgagaccgccgccgcgctcgccgcggcctccatcgtcttccgccgctccaacccgcattactcacacctcctcctgcaccacgcccagcaggtgggttggtgggtgggtgggtcatcattgcatcatcacccctaccctctcctgtatgtcactctgatggattgatacgtacacgtacgtgcttacctacggca

SEQ ID NO: 8393 - DNA, 397 bp, Zea mays
gtgttaaacttctcattgtctcgaccactaatggggcaaggcttcctaccattcatttgatcatcctctgacccactgttttcattgtgagaagtctcatgtaactttcccatctcctcattttccatctgaagtgcaggagagtttggaatatcagcagcaggagcaccactattgttaagctgataactattacaactattttcagttaacaaagagtcaccatggtaggcatcagaatatatagtttccggttgaaagtttgatatatcattaccactgctttcaggaagctttggaggcaacagttcatcaattacttctgtgttctgctgtacatcacagcccagagaagtgatctgttcttcagagttactattgtgaacattttgttcaa

SEQ ID NO: 8394 - DNA, 346 bp, Zea mays
tgctggacgaaggactcaggaataagtacaatgacaaggttatgccaagaatcaacaaacttcaatcaaatactagataagctcaaaatcaatgcatacagacatggatgacattggaagccatcaccattgtgtgccgagaaacactttgtcggtctcagcaaaagatgtccaggaaagatggaaatatagataataaaatctaaaatagagagaacacgacaatgctcttatttagttgaggcatatttcctggctatataagccttagccaaatttccgtagaggcagtttccaacccaggatttttcattcaacagttcgctgctccgtctaacacccagca

SEQ ID NO: 8395 - DNA, 341 bp, Zea mays
tgagtccagttatatgcttcttcagcagtacattcagaatgagaggttggatttgacagtgaaaagatgataggcctctgcatttataattagcaataccagaggttagctttccatcctcatcacaacataccaccaacaatgtcagaaaacaggaaaaaaaaatcacctcattgaaggaagccatggcctcaacaacttcttttgtgaatgttcttccaactccagacgtcccaatcagaactgtaggtttgatggactggaagatatgagaaaggttagtaaattctttttttttatggaaacagcacaaacatgacagcttttaagtgaaggcagca

SEQ ID NO: 8396 - DNA, 410 bp, Zea mays
tgaagacggccacacttactcttgtattggtagctatgtttattgttgcattatcaactattgatgctgccctctgctacatgctggcctggctacttcgaaaatctgcctagaataatggtatgttacttgctccttagatctgaagtgtttacaactccctggtccatattacttttgacctcagaatgcaggtgctctagtatcttgtaattgataaatttaatagttgaacccaggacatctttcttagcattttatgtgtttctagttgtaccttgatattcattttattcaactgaagaagtaattacaaacacattgctcttgcagttatactgacttgctgcttcatacacgaatttaagtgctgtctggatgctgccggtttactgacatgtgattcattt

SEQ ID NO: 8397 - DNA, 417 bp, Zea mays
tgctcgccggagtggaccaaagcaccgccagcagggtcgtgcagcagtacgacggcatgctcagccttccagcgctgaccagcgccgtgccggcggtgacgcagggcatgccgtcctcctccgcctactccctctctgggctcctcaacggcttctccggcggtgccgggactacggccgctttcgccggggacgggctcagctccacggagctcggccacagcggggccaccaccgggagcaacgtgactgccgccgcgatgccgccacctttggcagcggcggccaaggggtgcagtgcaggcgccaacggcggcgccacgtcgtcgaccccatccccgtacgaggagacgccggcgtcgagcccgttcgacggcctggacagcctcacgctggattttgaccccaacaacgaca

SEQ ID NO: 8398 - DNA, 419 bp, Zea mays
tgcagatgcgctgcactggctgtacaggaaaccgacgaggtagtcggcctcctgcgctcgccggcgctgcagccgctgctccattgacgccgacaggatctcggagctgaggacccgcctcatcttcttccactgctccccgtagggcgtcaggatggagcccttgtacccgaagctgaacagtgcggaggccactgtctccgggcgagacgccaggacagcgtcgttcgttctgagaacctcacgggctgtctctgggcaggcgactactacgacatggacggccccgaagcggaggcacaggacgttggtgtccatgtccttgagaaggccgtgaatccaccgaaacaccggcctttttgacaccacgcagtgcaggctgccgatgatcggcagcccagccggccccggcggcagca

SEQ ID NO: 8399 - DNA, 788 bp, Zea mays
tgacagagaatagttttgtgtcaagatggatggttgagccgggacttaatttaactgcaagggactagtgtgtgtgtgtgctacttgaattgttcacttgcttcgcagtctatgcctttgttgtcctctttcattggcttttaaacatcgccaagttagcgggtcacttacttgtgaatatgggagctgaagattccattaccatgtatcagatcgtatgttcgtggataagtagagaaggcctcgcacctggaaacatattaacaagcaacatggagagttattttgtatgtctgactgtatagtttgggagtgtcagtttatttcaagaagaaaaaggtttcattaacagtaccagtcagtgtatgttccaatcaaaccacgctgctctgctggcgccagcgcaacagcgtgcggtgggacgaagcctactgctggtttcatgcccagtactattggcgctgagacgaaggtgaggtgaactagcttgcttgaaggtttttctgcataatatacgacttaagctcgtagtcctacattcctactacatatatgtcgaccggcgtcctaatttcttgcttgttccttatgagacgtttctttcttccgcatgcaggtctgcacctcgctgactactaaaggttgcaacgagagtaatagcacatggtatgctctccctctccctctctctctctctctctgtaatgtttcttgaactaaacctttggctatagtccgttagggtttgatggtgtgtgtggaagctaagcgtggcgtgtgattgtgca

SEQ ID NO: 8400 - DNA, 347 bp, Zea mays
tgcatgctgcaggaatcctggcaagtgcctctgggggagcgtgatggatgcccatgttgagtggcctgagctggtctcggtgaccttgtgggttcacagctatcggcagtgagcactcctgtagcatttgttgcttcttccaaccccattagcttggcaatgacactgttagctctgttatggctaggggaatcttgaggcctcaaagtatccagaagaatatcatcagttctcttgtaaccgaggtccttctgacgtgagcctggactcagagactccttcctactgtccaaggacaatctaggaagctcctttggcctcgaggaagacctcttgctttcctgggt

SEQ ID NO: 8401 - DNA, 332 bp, Zea mays
tgcttgaggacgaccccacagtcgtgtacctcactgcatacctgttcaccttggatgcacagtatgatttcttggctcggcaccaccgtcagatgattgctcgagcagaagatgcagagaagcgcaaccgtaagctccatgtggatctcaccacagctcaagcccatgcaactgccttggaaagtcgtgaagtcattgcggttgaagccctgaagcaaaccaaggatgagcacatccagaagctggtagaggcctacttggtaacccacaaccaacgtagagccctgcggatccaagagcccgctccatccaacccagttcaacccatgaga

SEQ ID NO: 8402 - DNA, 356 bp, Zea mays
tgatgaagattggaagcatctggatgaggaccctggtttcatcagcttgattggtcctgcaaaatgaaaagtcagttgttggtgttacctccatcatctatgtatgtatgtatgtatgtatccaggccttgttcaacagttgtttggagaggggagattaacaattgacacaaccggcatggtattgctacgtctagctacaaaaaatagttccttattatccacagaaatactgtttctttgttttgttaaagaagcatgagttccatggaaaccagaacaatggaacttacccagatttgaaaacatgaccttgtgtgttggtttcttgtagctcaatatcatctacattggca

SEQ ID NO: 8403 - DNA, 358 bp, Zea mays
tgacaaggaaggtccagaggaactcatcgatgtagtcaatactgtccttggggagatttcagttcgggcaagaaatgttaaccttatcaatctgctgatcaggtagaaaatcttgtttttgtgcaataaataaaaacatagatgacacaatgttttcagaacattagacttctaatactaaagcattccctgtgttttccagggatttggttgatcttatatgcaataatttggaactttatcatttctgtcaagccaagattggaagagagaagtttgtggaccttccttcagagcgtcgtgatgctgaactgaaaatgatccttttagctgaaaacaagttgcatcctgctttatt

SEQ ID NO: 8404 - DNA, 403 bp, Zea mays
ttgaaagaataatggattaatatacaaatccctgagtagagtacataggcggcgggtagaaccgagtggcaattcaccctcccaacagatcttgcgaggcagatcagcagcacacgtcgctaggggttttttacatgatacaacatcaggcatctgatttttaccgaccaaaaaacaagtacctgacagaaagctacagccgcagcacagcacagcacagcactcgccgtgcggatccagatgttgacaccgcaggaattagcacgacgactcggaagttacgcaggggcgcgccccagggcaggctacctatttttcggagacgccgtgctgcttttcctcgacgagcaacgggggaggccccctttcacaggagatggtgggaaaggagatgacgacggca

SEQ ID NO: 8405 - DNA, 383 bp, Zea mays
tgtttattccataaggtgcagtccgagagtcgtagctatttcacaggctactcaggtatgcaattttcactgttccagagcagttcttggatcatgagtgatcctgatggggaaaataccttttgcagatacattgttttgatgccgcgaccatggagagagaatatactgttcttaccagtcctacggttgcacaagtttcaggctatggcccacttggattgggtcctagatggattgcatattctgggaatccagttccggttccagatactggacgtgttagcccacagcttcttagtctatctccctctgttccacctcctggttcaaatggtagtgtggtggcatattatgcaaaagaatcaagcaagcaactggca

SEQ ID NO: 8406 - DNA, 770 bp, Zea mays
cagaacgactctagaggatccctctgcacaggcttcacaatttgactacagcaaatgcgagatgagcaatccagcatcctgccctccgtcgtgtgccgcactgattaccgaccaactcttagttcgcaagtactgataaaaggctccatcctgcattcaacatgatatatgtcgtcaatctgcacagcaattcatagatggattatctatgctatacactatgttatcaaataaactgtagcgtggcatggaaggacatgagtagagaattaattgatgccagagtgggaaactatagactctaactcctcaagaaaatccaaatttccaacagcagaatccattatgtcaggctgtcagatcaatagccaagacagtaacagcatacggtggatgtggatatgctacaggacgggcaacattttcattgataatgattcacgagcctaccctttgttcagaggcctcgggggctacacccggcgggtgcgctcgcgcgcacccaccggaaccaaatgcaaccgagaaatgctggtccccttgcaaaaaagtgcgacgaaagcctccaagcgagtgctaacactcccttcgaggctcgagggctactgtcggggaccataattaggggtaccctcaagacgcctaattctcagctggtaacccccatcagcataaagctgcagaggcctgatgggtgcgattaagtcagggatcagtccatacgagcgactcgatcacgcctcgcccgagcctagcctcgggcaagggca

SEQ ID NO: 8407 - DNA, 385 bp, Zea mays
tggggagaagaaataaagaatgccaatatgattatgaacagctcaagtgagaaaatccttggctcggagaagatcgcaaagaatcaagggaaccggggaaacagtcacagcacattgcgtcctgatcatcaccagagcaacccacatcacattgctcatcatcttcacaagcaaaataaacaaaaaagaaaagaaacaaaagaatgtcgcttttgatccatgggtggcatgtcatcggccatcatcagcccctgcacatctcctgcctcctctcctgcgccacctcgccggcggtcacggaagaggctctgggcgtgttggtcaccgagtagaacatgacgtcgctgacgctcctccgcgccgccgccgaggccaccatcccggg

SEQ ID NO: 8408 - DNA, 415 bp, Zea mays
tggagcatctgaacagagttaataagtcacagccagccctggagcgcattactactgaaaaagagaagagaagaaaaaaaaacatccacattggatacacatacacatacacattgcgcgcggtttgttgacgagtgttggagaagttgaaattgtatgttgttgtcccgtgttcatgggacttggttgaccaaccctggctttcaattatcctcttgaaaacacattacgccacctgctatgctaccagacttgatttcctggtcgatcatgtgacaaggacatgaagtagaagctatatggataaaggtagagactgcctggagccagccagccaagacgagaggcaggggaagtttcttgtgttgccctttgaattgatcaaccatagagtaaaagaacgcgctcttttgca

SEQ ID NO: 8409 - DNA, 383 bp, Zea mays
tgccctgccgtgcttacttgtcgtgatgctgatatctgagacagcaacttctggtggctgcttgacttgagctccattatccttgaggtcacaaactatggtattttcagtttttcaccatgtcatgtcgacagtatcattctttttgtcgtgttgagaggtttttctgaatctggtttcgtatccattggtttgcactatggtctctttgacaacgactgttgtacaaacaaaccttagatgcaaacgcgcaaaagcatcccaaactttttagatcgttgaagctgaagccgcttttttagaaggccgttgctttcactcacatagtataatttccgcgggcggcgcatgaactcagctatccgcttccagcgctccaaaca

SEQ ID NO: 8410 - DNA, 380 bp, Zea mays
tggaatggagaaacggaaacaggcaggtcaggtcaggttggggttggtcgttcgctcgtagctagctagctagctagctaggctcgctcgcactcaccagcttgcccttctcgtctagcgtcctgggattctccaccagcaccgtctgcggcgccgcccgagcatcctgtgcagcagcagcaaaggtgatgagcgaataaagctccctgtcggtttcgtttcgtcgtcgtcgtcgggcattcactctgaggacaccaagtgaagaactaacagagcactgatacgtaccctgaccggattgacgttgcggcatgtcgggcagccgacggtggtggcgcccggcgggtacgccagggtggtccggcattgcccgcacgaca

SEQ ID NO: 8411 - DNA, 331 bp, Zea mays
tgctgcagggcagtctaaatgcaattaataatgacgcagacgatcgatctatcggtggagacgatggccacgacgacggcgacgaccaacagcagcggcggtgagcagacgcaggcattccccgccggcgccaaccgcaaggttggtagaggcaaccgaagaaccaaggccccggcccccagacgccaccaaaagtatctccttgaaaccaacgcctaattattcaaattacccagatggtcggacgacgagaaaaaggaggagggataggtcaagaagggatcggacgtgattatttaaggcttgttcgcttatggtggaacaatataat

SEQ ID NO: 8412 - DNA, 381 bp, Zea mays
agcggacgagaccagacacgggcggggcgcctttctgagaacgagcctccagagcatagtagcatgctaacattgggacagggaagacggagtgggtcaaggtggggagcgcttacggcgaaggcggagaaggaggtggacggcgcgccggggcgtcgctcgcaggcgggcttgagcagcgcgaagtcctcgcccttcttcgcccggcaggcctgccccgccgcgaccgaaggccgctcgccgcatcccagcgcggcccgctccgccgacgcctcccgctgcagaaggtctccgagcgccacgctaccggtccgccgcctcccgctccgcgacgccgacatccttaatcacagccagatcccggcggcggccgcggcggca

SEQ ID NO: 8413 - DNA, 392 bp, Zea mays
tgtatcagtattgttttcaacctcgaaatactctccaatggatcaatcaacataatattcattactgagtttcaggatcacctgaattgcaaaacggcagttcttccggtagtgcagggcaatgtttcaaccctgcttttgttcattccgtagcagtttctgaagaggatattttgggagggctctacaaggtttgtgctgttgcaaggggggatggtgctgttgatgtggttgatcttgagtatgaactggcccctgcgaaatcgaagggacctcctcgggcagctattttgacaacgagatcaaaaggcgctgaacttggagatgggagctgcaatcaaagtcgagcgaaaagaatccatcttgactacaccatgggcggccatactgca

SEQ ID NO: 8414 - DNA, 329 bp, Zea mays
tgacagtaatgcactcgtttatatagatgttggtggccttatcctagtacaaaattagcccagattgcaatctccaagtttctcatgctttaaaagtagatttaaaactgattttaaaactaaccggcttagaatagcatatgacggttttcacgggggcgatacaacctcataggtagtaaaatctacctagacaattttgtgtggggccgtcataaaaaacattaaaaaaattcattaattaatcttgacaccaaataagatgattcatatgtcttttttatcagttcgatgagaggacacaaagttggaaatccgacgtagctggt

SEQ ID NO: 8415 - DNA, 420 bp, Zea mays
tgaagatgatgaggaacggtcaggccgcaccttagttaacgaggaagtcttgggcagaatgttcaggagcctgaggaaactgcgggcgctggtcgttacaacgaaacagtaccatgaaccagcgttgttagtcccagcatctatcgattagatgaagcatctgcgttatctaagctttaatctggactgttctcatcgcagtgtggagcttattttcccaagcacatttagcaaactttaccatatgcagagcatatatagtgagaaaatttcctgcgccaaagacgtgacacaaaatctcacttccttgcggcacagctcttcgtcgtggatgggatttgcaaacgttggcaggctgacgtcgctccaatcgctacggtacttccaagtgaagagagaacaggggcacgaactgaagca

SEQ ID NO: 8416 - DNA, 493 bp, Zea mays
tgccccaccgaaaaccgagcagtagtgcgaaagcgcacgtcgtgcagcatcttgcatggctgcctcagctgagtcccgctcagagatagaatagtgctctgagcaggcctctgcaccctggagactgttctccgggtggcgcaccaagcaagttgcctcccagcggtccgggtagaccccgcgactgtgctggtagaccacacagcgatactcgacggaccaagtatgtcggttaaatgcccgacgtagcagggtgtcgagcgcatcgtggaagtgacacccgcgagcagcgtcgcgagtgatgggtcgagcaacccatccttccggctcagggttagcagagaagtcggtgtcgtggctcgagctgtcgtcgccatctccgtcgtctgggtctcctccagcagctactccagaagctggggcgcccagtggtggtgcagggggcggctccagaggaagcacaggagagcagctcctcacagactctatctcc

SEQ ID NO: 8417 - DNA, 357 bp, Zea mays
tgatcacactttgcctgatgttactgaggctaatgcaattgatgatgttgttcctagtgtggtctctgatgtcagaatgcaggagataggtactgagcagcttcaagtgcatgaacaggagcaggttcagcccaagagtgcaacaaaacaatatatgaaaccacctatcactaccacgtaccagagaagagagaagaacatatcaactccaccttcagttgcattaccagaaactgccacaacacctttttcttctgttgttccttcacaagaacctactgcagctccttcaccatcgtttcaaagtgcttcagaatcagaagagcatgtgtctctcatggaaggaactgaaagtgc

SEQ ID NO: 8418 - DNA, 403 bp, Zea mays
tgcagaaaatgcaacttttaccgcagcataattctgcagcttcttatgcctaaacccactaaattgaaccatcattcatggtacgacacagagggacatggaagacggaagcaaaacagaacaggaacaaagataaccgggaacaacaattttggaactatgatattgaaattttataacctaaatggccataaaagaaagcctatgatgttgtacaactgacgggggcacgaccatattcaacacaccttcccctttctgaccttcacatcgcaccatgctattcatctgctgctccaaatttgcagatagaagggaaacgaatcaactgctttcctccacagggcctgtgttcaggtttgcacttccttcaaccttggcggtggcagcggatcccttttca

SEQ ID NO: 8419 - DNA, 419 bp, Zea mays
tgacgcccctggtcacgacatggggcaataccgagcgtcgcaacgggagccctagacacgccactaccactacccgtgaagaacaaccaccgccagataggtcgcagcaggtcgcgcagatccatcaggacctgatggccacacagcttggggtgaccgacgacgctgtcgtcgtcgtctcacatgccgagaacctcgaggtcaaagtttctggatctgagtctaatgtggttgttcccaacataggggtcaccatgcacggcagcaacgaggtcacagagaacagcggccgcagcagccatgacaataattctgtgatcatcatcatcgacgatgacaatgacgacgacgcaaatcctgccatcaccgtcgcagcagggtctcctggagctcctggtctagctcctgatgcagcggca

SEQ ID NO: 8420 - DNA, 802 bp, Zea mays
tagatccctctgatcgtgtagcatcactcaaaagctatcgtcgtgctcgcggtttgtgcgaccactgtgcatagaaatggtttcccggtcacaaatgtgccagcacggtacagttacatgccatcgaggaggtatgggatctactggcagtaccagaaagtgtcgaagacgcacctgaccagccggaacaaatcatgatggcactatctctatcaccagcagcatgggaaggaattgacaaaggaaccactatgtgatttgctggtcgcatgcagcaacacggcatcctcatattagttgactcagggtcttctcacacttttgtcagtgaccgcttacgggccacagctgaacctcatagcaaaatgaagagcaatcctcagcaatcaatccaatttctactccttgtcgccgcttagctgatgcgataagcgttccttatcctgagcacgtcatctctctcacacgctcaaactcctgaagcgtctctcccactgctcactctttgtcattatcccagccatccttatctccaaaccacgtcatctgtttcttatccaattagtgctcggctggaagccttctcgtgtacaccaaattcctccttatcccctccacgtagcctctttgttcagccctggaaattactggacactactccatctcgtgatattttctctcttccatatctccccggaagtcgctggacatctcctaaataatcctcagccggtacttctgctagtccgtgccatgcttatactggtgatcaagatgcctatgtctccaccaccgtcgctca

SEQ ID NO: 8421 - DNA, 395 bp, Zea mays
tgtttctgtttctattctcacgtcacgcgcaggctgcgggcaagcaatggcaggtgggccctgtcgcgctggccgatccagcgctgactcagcccccgcaccgcatacatgagagatgagaagccgccacccgccgctgcggctgcggcgcccgcgccaccacgagtgacccatcgtgctcggatcgtacggcctcaaccgcaaaatccagtatttaagcgccgcggaacactcgtcgagaggagaggacagagcagaggaccaccaccggaccgggctggagctggaggcgtggcggcgccggcgcgtccatcaggaggagaaggggcagggatggtgctgggcggcggcatggcggcagcggccgtaggcggggacgacgccgtcgtcatgca

SEQ ID NO: 8422 - DNA, 367 bp, Zea mays
tgcaacatccaactcccacaacacccggtcccaaatatcagttgttggaattgactcgatcgcgatcgccggcaggtagttattggccggtgcctgcggacggcttgtccagcgccgttcaacttcagtgccttgtcttttctgcagggaccatgccaataacgcacggactggacactcgtcacgcgcgcacctcgccgtcgccggtcgctccctgcccggtggcaccgcgcgcacgctgaacctgggctgggctggatggttgcgcagccatctgcacaaaggtggattccctcccctccgtgagtgcattattgatgagctagctgatttgtttatgattgcgcatgtacgggtaatgggcgca

SEQ ID NO: 8423 - DNA, 752 bp, Zea mays
tgacagagtaaattgctaaaaccaacagacaagttttgcggcagacaaactttttcagtcttaagcctttacaaacttcaccatctacctacagctacaagtttttgctcaggttcaagaaaaggactagtagatgaagcaactgatgtcaaacacaaaaatgcaagaaattagcaaacaatgctgcgagcagattttatactaaaaatcattctcacattgagtcacaaagcaattgagcagagtacgagatcaatgaaccatggatctatttgcttcagtcagaacattgtaactgatccatgaactaacaaatcatcgttattgagatcaagaaattcagatcgtcacagttttttatgtgttggaccctatatttgaagataaagcactgctttaagacactattagagatgctctagagcccatatactggagccttatactcattttattcactatttctgaccatttatttcctaaataaccatatctattttttaataacatgatatatgatttaattgttggagctacaaatgttttttttctcaaacagtttgaatcaggtcttattttaatttttagaacttaaatataaaacttcttggtagagatcaacttaaatcagatcatattttaatttttagaaattaaacatagaacttcttggtggagatgctgctagttattcttaaatagaaagagatttaatttttcttgatctcttctggtctccgtacaactctcca

SEQ ID NO: 8424 - DNA, 395 bp, Zea mays
tggagaagacatgcttcacccatagcctttgagaacaaaccaaatctgcaacaggctaaagcacacagtccagaaagtgaaactttaaacccagggcataaaggaggaggagacacaggagaaataaccccatcattaagcaaacggcactcactaactgagtcttttggagcaaagtgaatgaaatgggaggagagccagctcttcctaaaagactaaaaacaccaaagctaattgggaacaggaaaagttaccaaatcttcaataaccaggcatgtaccacactagtaccattgagcttgaaagaaaagggtcatgtttcaccagatgaagaatacgaaaacaagtttggaactaaccaagaagtgcggtctcctttaggatatggctaggca

SEQ ID NO: 8425 - DNA, 418 bp, Zea mays
tgcggcttaattttgatggtttagctgctgtcttagtggagctgtatcgtcatattttgagctgtgaatgctggttgcattagaatggttatatacaagcacaattgttgagctgtgaatgctggttgcattagaatggttatgtgcaagcacaattgttaccatggattgtggtattttggtgatctttcttcaacaaagaaaaaaattggtgttaatgcgaacctactacacctcatcttctggtaggataggattgttatattattaggtatggatatggaagcacctttcttcttgtgaaaagctgtgaaaaatctctcccgccattataatgaataatgggtatcagatggttgttacctgttggtatattaatcattgtatctgcttaaattctgtacacgattagttcaca

SEQ ID NO: 8426 - DNA, 406 bp, Zea mays
tggcatgtcctcccgttccacacttccactgcgcggctctcgtacgtgcccgaccggcaacacccctagactgcctgctagccatttgcgccttcaccgactgatcgaccgatggtactaggcattgtacgtggcgtctctgctgtaacatgcaataagccaccctctagctatagctccctgccgtgtcactcggatagccccggacacatcgtgtttgagcaaacaaatttgaagttcactggtcattggcgaagggcgactgggtatatgttcacatcgcacatataataatatttagcctacgttcaaataaacacaactctcattttaaaaaataattcaagttactgaaaaaaagcagcttgtttgatcatcggctgcattcatttggcagaatgcagca

SEQ ID NO: 8427 - DNA, 411 bp, Zea mays
tgcagcaggcgcggcgagcccgggacccgaactcgcaggtcaagttcgacttctccccgttcctcatccagtacaagagcgggcgcgtgaagcggctcatgggcaccgacgtcgtgtccgcgtccacggacgcgcgcacgggcgtcacctcccgcgacgtcaccatcgacccgtccacgggcgtcgccgcgcggctctacctcccgagcctccgcgcccgcgcccgggtgcccgtgctcgtctacttccacggcggcgcgttcgtggtggagtccgcgttcacgcccgtctaccacgcctacctcaacacgctggccgccagggcgggcgcggtcgcggtgtcggtgaactaccgcctcgcgcccgagcacccgctgccggcggcgtacgacgactcgtgggcggctctca

SEQ ID NO: 8428 - DNA, 403 bp, Zea mays
tgaagaaagagctgcacatctggatggtgcattgaaagaatgcatgaagcaagtaagggctgttaaggaagaaggtgagcagaagctacatgatgtagtctttgcaaaaaccaaacagtgggagaagataaaggccgagttagaagcaaaattacttgaatttgaacaggaactcataagggctggtgctgagaatgatgcactcacaagagcacttcaagaacgggcagaactgttgatgaaaattgatgaggaaaaagctcaagcagaagccgagattgaaatcttaaagagcacaatccaatcgggcgaaagggaaataaattcacttaaatacgaattgcatgttgtctccaaagagcttgaaatccgcaatgaagaaaagaacatgagtatgcgctca

SEQ ID NO: 8429 - DNA, 469 bp, Zea mays
tgctcggagcggcgttcctccgggtctgggcggctctgctggccgcgtacgccgcgttcgtttgctgcacctcggtcgtgcacatggtcgcagacaaggtgctggccgtgaagacgtgcttggatgttctgtccctgcctggtgcgctgctgctccttgtgtacggcattcggcacgccagggaagaagaagaaggagatggtaacggaggaaccgaaagttctttgtataagcctctgaacgccgaggctcacgacgacggtgcggccgactcgcgtgtcaccccgtttgctaaagccggggttttcagcatcatgacgttctggtggctgaaccccatgatgaagaagggttacgagaagcctctcgaggagaaagacatgccgctcctaggcccctcggaccgagcgtacagccagtacctgatgttcttggacaacctgaacaggaagaagcagaggtaccgagc

SEQ ID NO: 8430 - DNA, 408 bp, Zea mays
tggagcatattgtataaaaaatgccagttaactttgtcataagccttctcaaaatcaattttgagaataatcccattttgctttttccttttaacttcatgaactacctcatgtaaagcaactacacagtccagaatatatttccctttgacaaaaccaaattgattttcactaatgattttttgaatgcaattagataacctattattcagggttttggtaattattttgtaactgacattcaatagacaaataggtctaaactttgtaatttccatagcattatccactttaggaattaaagtgatcagaccataattgagtctttcaatatccaaaattcctttactaaagtcatcacacaagttccaaatctcttttttaatgatgtcccaaaaatcctgaaaa

SEQ ID NO: 8431 - DNA, 408 bp, Zea mays
tgttgctgtgcatagcacatcactaacacttggattgacaaaaaccttgtacctgaaaattcaacagaagaaaacagatacctgaatcagcaatttgcataggacaagatcaagataaaagtgatgtcgttttagtagctttgatgcttcgtagaacctcacccatggagtgaatcatctgcatggtcctttcccttgaaaaaattgatgttcaaatcaaatttcctagcagcgttctggacagcttcagagtcctcgccatttccatatacatctatcatgaatccttccaggtcgtttttgtgtttggataataaatcaatcagttctctatatcctttagcccacaccatcttaccaaggaaatatgctcccttagaaaagaccttctgtccacactccctatca

SEQ ID NO: 8432 - DNA, 424 bp, Zea mays
tgctgccgtccgcttttggttctctggagtctcgactccccccggccggtacggtgtggtagcctggtagtggtaggggggccggggcgggtccagcgccaggggctgtggatttcccggttcgggggtttcggagggccgcgagtgacggcacgggggacagactctataggctagcgcacgcgtggttcgcgagcgagtccgcgtccgtccatgcctgccatactactctaccccatggtggcatggtgttgctttgactgactcggtcagttggaacttggagcgcagcaggacgcccaggagatgcccaaatctccgtggctccccctatattttcttccggtggcttaagcctagcagcgcctcgatcgcgtggacgctccgcgccagcggccgtcgtcgtagagaaaaggacgacgca

SEQ ID NO: 8433 - DNA, 387 bp, Zea mays
tgatcttagcctggggccaaagctcttccacctccaggtcgcactggagcatttcaaaggctggaagatcccagaaaacctaaccaacgtccacgcctacaccaaggtacacaagtgttcaagtgattgcatttcgccgtcaactccataacctgtactacataatcgaataatcaagctcacctttgtctttgcccaggctcttttcagccgtgaatcttttgtcaagactaagccatccgaggagcacatgattgcgggatgggcgcccaaggtgaacgcgtaagcacatcgcgatttggtgctaactggtggactccatccatttatctgatcagtcgttgtcagtggtgtgtgtaggtgtcacatctgtagcctagacacatg

SEQ ID NO: 8434 - DNA, 412 bp, Zea mays
tgattgcactgagcagtgagcacactagctaactctcggccgaatcgctgggcgtctattaagccgacgccaacgacgacggctcctcggcatgcgaggtcctgctcgcccgggggatggcgcctgcagcttcgatcctctcggtcaccgccgtcgccggttccaagcgtccggccgcttccgacgctgagctcccgctcctcgacctcgactcctcctcgctccaccagcagcaggtcagtagcagcgtgatcaatcctacgtacgtaccgtaccgacgacggcacgcacggcagttctgcgatgatcgatcactgacgtatatactacgcgtctgcggctgtgggctggcatggcagggtgacaaggctgggcgcaagggccaggaccaggaccaccaccagcagcagca

SEQ ID NO: 8435 - DNA, 451 bp, Zea mays
tgctaaaggagaggccatggtacatggaaggaagacaaaaactttcagacacgctcgacaacacgctcgacaactacagtcatcgtgagtacagcttgtatgattggcaaaagaatcattgcacgaacattaaaaactggtgcgaacgtcaattattagcggcgaaaggctaacattataggtcatgccttttagcctgaaaacgagataacacagaaatgcctcggcggcaccactataatgaccctaatgaaaaaatctcctacatgtttggttcctttcagttcatatgatcgacgaggtactgtacaagtacatttcgcatgtatcgccacttgagctctaacaccactattgagattccaaaggagagagctgattgcttgagaacaatgaagcttgctgatttcccaacagcatgtatgaaaataaggggcagaaaagcatggca

SEQ ID NO: 8436 - DNA, 488 bp, Zea mays
tgttaagaaataagcatttgtgtaaaagagttgcagccataaatcattgcaagctctacctagtttaaaaaatataaaacataaaaaagatcaaatttgtcatcaattcactaaatgctgatggaggtagcgggacaaggagctatgtaggcaggtcatatcaacaaaaacaaaacaaaacaagccaactgcagtcatgattctatctgcagcaaggatgccaatgaacccaactgaaaacatggccagggcagtgaacacaaccaaacactaataatgaaatgatgatttctgttgcatcttataagccaatcaaatcagttcaacccactacagcagtaacatatgcagatctggcaatgacctccaacttcatctatcaatctgtgtcatgagcattgtccctgttgttgttctgtacaggtgcacacaactcttgtgctggctgagcagaatgcccacagatcagaaactaaggaggcatgaca

SEQ ID NO: 8437 - DNA, 429 bp, Zea mays
tgcctagctgcattcatgcgcatgcgatgcgccacggtaggtagtatgtagcagagagcagaaataatgacattattagtagcagtagattattgcatttctcctccggccgctagactttcacgacgacacgctactagtagccacctagcttgatcgatggcgacgtgaccgttgtttctcataaaccagggctgtcgatcggttgtttaatgctgcttctttttctttgtgtgttttttttatgtgcgtgcgagtgcgcgcgcgcgtggaacgcaagctatagtctgttttggatccactcactcactcattcgtcgaacgattgaccaggcaacggagaagaggaggaagagaggaagaggaggatgacgacgactgacccacgtagtgcgagaacttctcgaggtactccaggcggccggactc

SEQ ID NO: 8438 - DNA, 1127 bp, Zea mays
  unsure (1)..(1127): unsure at all n locations
tggaattcaaactcgggacctgataagtactactctgaccacctatcaactcagctagaggccctttcaccaaaattgatataaagaaaacgataaattgatcatttattgatttttttttctattcatgtgctatcttgactcaaactgcagccaaacttttgcattgttgataggaagtaccctgcagaattcactccgacatatgcatatcacgtacaataaaatcatagcagagtaaaagttatctaaagatgtattgaggatacaattaaaccttgtatggagttgctttaaaaactacaaatgctcagttatggtattccaatcctaaatctgcannnnnnnnnnnnnnnnnnnnnnnnnnnnnnnnnnnnnnnnnnnnnnnnnnnnnnnnnnnnnnnnnnnnnnnnnnnnnnnnnnnnnnnnnnnnnnnnnnnnnnnattnttnttttttttttcatttaagaaaatttacttattattatatatacttatgtagtaataaatgagatgtatacatgcttagtgcatataagtactacattaacgattatcaatgtactacctataattataaatttctaagctaacaaaacaatatacctatttatcttatcattcaagtccgtactacattatgagacggtactttgtattagatctcaattatcacagttcttcttctacatcatgcattccactatgactcctcattcaagattactaatctaattgacttttccatactactttgcgtagtcacataatcttatacatcgataactattctcatacacactaaattgtatttaccttactccatcaacactcgcttacactcaacatctagttggagtgacaccatctgaatatgttcggacacatctctacactatctactaatctacatctaatgaattatcattagtagtaaatctcacgaacctatactcaatagatccgatgatgattactatcaaacctatctccatctcaccatatgagataaatcgaccgcctatacttattacatgaattctcattatattactagatcggttaaaacatatacctcatacaaagtcacctatctacatgctatctactcccttcaacatatatta

SEQ ID NO: 8439 - DNA, 439 bp, Zea mays
tgcgggcccgcggtgggagtgaccgacgccgacgtccgctcgacattcggcgccttcggggaggtcgcaggagtccaggctgccgacgacagcggcgcccgcatcatcgtccggttccacgagcccgccgccgcggaggccgccatggctgcgctccacgggcgcccctgcgacctccttgcgggtcgcgtgctgcacataaggtactcggtgcccgtgaagccaaaggctcgtcctgggggctctgtaccggtggctcacgcggcatcggagctcggaatccccgggatttacatggttcaggagttcgtgactgccgctgaggaacaggttagccaattttgagacatctctgtttgttgcccaaatttgaggttttttgctaaatagccctgcttcgatgtgctgagtggtactacatcttttgccaggagttact

SEQ ID NO: 8440 - DNA, 354 bp, Zea mays
tgacaatttttttaaaaaaacaatattagacaattcattatgacctgcatgcctcaatgcatacactccccagatccagttttgattcgtctgcgctatttcatgtgccaaatttttcgatggagtttgtctaaaatggcaacatgctggttcccagttatacattggtcttaggctcttagcatatcattgatccttttgtgtaataagaaattagggaatctactttcacatttagattacactaaatttatggaagctttcctttacctcaacatcgtcccagaaattcttttcccagcgatatacatgggtttcgtctatatgcgctaagtcactgttatgttcctttca

SEQ ID NO: 8441 - DNA, 391 bp, Zea mays
tgctccacggcctcgaccattgccacagaaacggggtcctgcatagggacatcaagggctcgaacctgctgattgacagcaacgggacgctcaagatcggagacttcggcctggcaatatcgtacgatcccagcaacccgcagccactgacaagccgcgttgtgacgttatggtacagaccaccggagcttctgctgggtgccacagattatgctgctgcggtggacatgtggagcacaggatgtatcgtggctgagttgtttgctggcaagccaatcatgccaggaagaaccgaggtagttctaatttgattattgatgcttcttgtcgttttgcttccagacatcgatcaccaattaatataatgagcccgaaatcgttgccattgcca

SEQ ID NO: 8442 - DNA, 430 bp, Zea mays
tgcctcacttatgactacgtcggggatgatccggaggacagtctcgcggagaccgatctgaacgcggtttctgcccttgcctccctcgccgcgttgcgccctcctgctgcagccggagtctcgcaccgtgacgcccttcaggcttgtgctcatcacgcccgcctctggctctgccgtgcggatgaacccatccatcctgactccaccatcacatgtgggtatttctacagggcgtgcgcttgattttgttttgagatggtatggtagtgtgacataaacttaatctgcatttctttctggctgtagatgctggggtgagggcaaagctggataggatcatggcatcgggctactacacagcgcagctagaaatgaggacaccattggatctggctgctgcagtggcaagttttggagcaggaggtgtgca

SEQ ID NO: 8443 - DNA, 385 bp, Zea mays
tgctcctttccttttcttctcttttccttttccctttttcaacttttttaatcatcatgatttgacattattgcatattttggcgcaatttaccataagcttagttaaagttagaagaaaaaaaaccatgactttgaattgagctgcattttagtcaccgtgattttttaacccagtttttgttgcactagctagtgtttcgttaactccaatcctcttttacatatacaccgcatgcatgcatgcaccaaatagtagctctcacaacggattttttttttaataatggaacaagccaggtaccactcgctcatgataggtaataatgaacacgtaaaaaagattctgtttcaaagattgtaacacaaaacacacaagtagatca

SEQ ID NO: 8444 - DNA, 384 bp, Zea mays
tgcgatggcgagcgaggctccaatggtggtgctctagtggtcgtggggcaggcctagtgagggaagagatgttttggtccacgttcgatgtggcgggaggaagcatgtcaagcctcaatttataggcgctgggggaccacaacgaggttgaccaggtcccggccgcctccctcatgatgggacttgactgacaggcgacaacagagcgtgacgatctaggtgcgaggactagctcgggtgggggtaggggatgaggcgttgtcgatgcggtttaggggacgtgatgaccggtgctcaaagacggtgatcggtggcgactgtggagctccacgcgagtgagaaggggagggaacgcgagcgttttgtctgcagtaacgtgcggca

SEQ ID NO: 8445 - DNA, 362 bp, Zea mays
gctttgtttagaagaactagatccggttccggtcacaatcgagaacacaccaagcacagaagtcttctagagtcactgatgccatccaaggtggtaagatgttttgctgttctgtacagaagctgatcattctgcagtgatttcagaaggatcttaccactacatattgttttctgtagactgttgattcggataaaataaggccatcgtcatcatcgcgcaatggaagcacgtcaagaagagctgtgcttccatcaagcaaaccaagctcttctggagatccaagcgacccaaaccgcgtgggcggcttggccccgagtagcagcatacgcccattgagtgcccaaagggcacatcattca

SEQ ID NO: 8446 - DNA, 805 bp, Zea mays
gaaacaaattgtatacccccaaattcaaggtgttatagtgccgctgtcggataccgttacactgtcgcctccaccaccaccaacgctcgtgggattggctactcctgtggctggagtgcaagcgatggggcctcgcttgatgctgctttgaatgagggcaaggtgtagacatgttgataggctttatttagtgtgacagtgttgcgaaggctaactgatattttgcgaacaatgcttttgtgcaggttcctctatggggcctgcacaaagcgattctggagtcgtcttgatcaaggaagatgaccctttgtgaaaggaaaatggcctcaacatttcctattatcgattttggtgtttgacgtctatcacaaaccatgtggactaactagtttgcgtagctaatatttttctcagaagcatcaaacatttgacctcactttggctatatggttgcttcatcgcctccatgacacccttaaggtcatgctccatgtattccatcaccataaaagtatcatcgtcatgaccaccaacaactacttccttgacatccacaattgaaggatggtcaaaggatagaaggatattgatttctctgagagaagtcaatggaaacccttcccgtccattttccttatctaccttgaccttcttcaaagcaactatctcaccagttttcttgtctctcaccctaaatacgactccatatgtaccctcattgattgtgttgatcctctcaaagtcatcaatactcctacagccctgaagcatgttaaagcacctacgtggtgttcgcacaacctca

SEQ ID NO: 8447 - DNA, 413 bp, Zea mays
tgggtctgggttcctgcatctggtcttgcgttgtgtaacatagcagttgttcttggacagccgcccccattgtccccaccggcgaaattttggcaaccatgtagaaagatgtatacactttttattgtatcgatacaacctgtattatatatgtaaattgtgcagaatgtttgtaccacttgcacattttataatgtggttagtacattgaattccttcacggagggtgcttgttgacatctgagttcgtgatctacgggccaaagcattggtgaaagtgtttctgtcggtactgatgatttcttcatgtgggctgggcaaaaacaacgcagagcgttttatcagtttgcatgtgtccgttggcattgtgccaatgccaacgtacttttatttcaccattggcagctttgtca

SEQ ID NO: 8448 - DNA, 393 bp, Zea mays
tgtcggaggggtaccacttgtgggacctgtacagcttgaacagcgaagccaccatgtccggctcgcccagcgcgccgcacgccgccatcgcggcacggtaggcgtcggcgttcagcggcaggcgggccaccctcgcctgcccgtacagaagcaccgttctccggtacatgtgcagcctgttgtacgcctgcatggccgcgctgaaggccatggcagcgggggctcccttcttcacctcgacgaccccgagcaccgcgtcggcgaggccgaatctccccgccctgatgcagcaggcgacgagccgcgcgcacgtccgcttctccgggagcacgccgtgggccctgaagtcctcgaccagcagctccagggagccccactgcttctccctgatca

SEQ ID NO: 8449 - DNA, 423 bp, Zea mays
tgtaggatttcttctaccgcctcctccttatcctgtatacgtcagctccccggacgcttatctctccccgtgattatctcaagccgccgctggcagcttggaactcctctctgcttccttagctgctcgcctaggtccgacgtgctccagctcctgctcggccgccgtttcccctgctcgccgcggtgctccatttctaccctctaccggcgtccttcctgctcgccccagcacagcggtttcctgttcggcgcccagccatccctctgtttttcctccctcgccatgccgcgcagttctccggctcgccgacgttttacccctgcgcgcgcgctcagctcggcgttcccttccccagctccaatcttctctgccgagcccctccgtggtcgcgttccggccaacctccggctcggatcggtc

SEQ ID NO: 8450 - DNA, 394 bp, Zea mays
tgttgtctttgtgtgatggatgagttcatctccatctcccgacgacgacgacgggtggaagaagaaaggcaggcaggctggctgcacttggcgtgtgcatgactgcatggcctggcgccctggcaaacgacagacacgatgactagcagtctagcacagcatgcatgtgtgctttgcgtggctacccgtccacgcacgtatgcaagagcccctagctgtagcgggtactacatacaaatgaaaataccctcacgcgtacacactactagcctagtagatcatgtatatcatctgctcatcgcagtgaatgcaagctcatacatggaaagttagctccgcgcgcaacaaacaaaaagtgaaaaggaggccggggtagtacataccaaaacatgca

SEQ ID NO: 8451 - DNA, 410 bp, Zea mays
tgcatatttgtctccaagctcatgcatatagctgatagcaggacccacagattttatttatttcctcgctgtgacaccttaaaagggtagatgctgccacgtctgttcatataatttggtgttctttgcttcatgcaagccttgatgtattctatgttttttatggcatactacaggctgaatgggaggaagtagccaatcgtgcagatttgctaaagcaggaaaatagttcacttaaagaagaattgaaacaacttcaggagaagtgtgatggcttgacctcagaaaatacatctctacatgtaagctttctcttttgtttttgacctcagaaaatacacctctacatcatgttggaaggattggagcagagagaaaggaaggtgagtgctagtttgatggcggcagca

SEQ ID NO: 8452 - DNA, 408 bp, Zea mays
tgagggttcggcgttatggcgacacccatcataccatagtaagtgaagtagagaaacgagaggaacgaaatgtagaagaaccagaagaatttcgctagggtccactggaaagacatcatcgggtacacgataacagtgtatatgacactctcgacgaacacatatggtatctcagcaacaacctgaacagagaaaagaactcattagtatttcaaaaaaaaatgctatcagatagaacaccaattcaaatcgtttttgtttctgccttatgccacacattaaatatgtgcatcgtccttggcatgaacatgaccttgcaattgcaatataatttttttttcggttcagttgaatcgtcagttcatactgacctgcgagaaagcatagggtatagccgagtacattcca

SEQ ID NO: 8453 - DNA, 393 bp, Zea mays
tgacagtcgtcggatgcagcagccgatggaattgcccccgcgagcgcgctttgccggagtcagcactggcccaggattcgcggcgcttcccgcagttggcgtgtggcccacaactctgttagcatgtcaaacagcaccgttcccatctatacgtcgtttcccctgctccgttaagtagcaggcgcaaacaatggactgttactgtatcattattcaaataccagtactacaagatgtgtacttataaggggccacaagataagataaaaaaaatacatgagcatctttagaacttgcttcagaatacaacaatcattttagtcgacagaccgacatcttcagaatcatcatcaaaatctacactgtcctcttctatgtttttacattcttcaa

SEQ ID NO: 8454 - DNA, 380 bp, Zea mays
tgaagagggtgctggcaggatccctacctagccgcacgacagggaaaaagtagctaattctgtcagctaggccaacattagcattacatatcatttgttaattatactagatagcacatatacctctcgcatgagcacaatccaataatagataagtttattacacatatactctgacatatacaggtctccatagctcatatataggtatatgttctagttggaagggaaaatgtttcacgtccaagaggaaaataaaatgctccatatcaaaactctatccaagaaaaagaagtgctctacaaagggaaatttcgttccataacaagataatcatattgattgatttgaatatactagaacgatttagtttcctgcat

SEQ ID NO: 8455 - DNA, 425 bp, Zea mays
actatatggtgcctgagtcttgcatgaggttgacaaattcttttgttcactaactctttgcctgctgctgacagaatgagaaccctgcaatgtggatgcatggtgctagttcacgagggatgcccccacttgcagccagtaccatgtatggctatcaagggcagagtcatcaggccggccttcggcagggccaactaccttcacaatttggctctgcgcttgggcagtcacagccaggcctgggccctgaacaccgaaaccctagcgatagtaacctaagtggcgctgctcaggctaaccaaatgtggccaaatacctactgatccatcccccttgtcgacttctgtggagggcggtcctgttgtgtgtgcaacgccggcgaggccatgcagtgcttgtgttctgatccaggcacgcggatacca

SEQ ID NO: 8456 - DNA, 847 bp, Zea mays
tgattgcacaccttgtcacccacccctttctaaaaacaaataatcaattaggaagcatgatcaaattaaacataataaacacaaaaggaattagctaacctgaactgaatcagaaacaacagaggttatggacttctcaacaacaggtgtaattgcgcgagcaacaacaggcccgagtgaagaaatttctttcttaagtgacttctccagattagaaggtaagtccttatttattgagcttgtaatgagagtacacaaattgctgcattcgctctctatcagccttttcacgcttagtgttttcctcctggagacgaacccaaaacgcatcaatattagccttgaatgatttctctacagtgcgccctaataatgtctcaagtcttttgccctcctttgcgatggacacaggaaccacagtactcaggtctcttatgaccttcgtccgaaactcattatttcccgaagggacataatgcttcgaaggacgaaggactttaacacttaacactttttatgttgccttgttcttaattcttagcatttgagaacaagtccccaacactggacacctagcttctcatacaaagctctaccacagctgttaagatgagcttgcttgaagccgctcgtggttttagttccactcgcaactaggtcggacaaatatttgagcacgaaactagacattgcgttggaccaatagacctgtccagctccacccttgcctgccatgttgtccccatgttgctctgggtccatctcctgtgtaagttataaaaaatgacaatgaacaccaagataaatttccttgtctgggggagctctagaggatcctctagcgtct

SEQ ID NO: 8457 - DNA, 425 bp, Zea mays
tgctggctctggctgccactgccactgccactgccactggctcccacgtcccaccacgggaacggcctcgggttaattcccaccatctcgccagcctgctggtgctgcccgctagcaatagccgcagccgggttctgtgttttttcaaaggccacagccgtggttcagtcaaagaaaagttttggaacaaacagacatgggatcacttgaggttaagggctcgggaaacgggccaagcgccttaccatgaggcacaggtagccgccctgctctgctggcatgtgcatctcctgcggaagttcaggacgaaacagaactcttgcgtgtcacaacaactcggaccttttgaaagagagatgtgtataggctaccaagcgacggataggaggttggaatgctgcgtaccctttggtggatctcgagca

SEQ ID NO: 8458 - DNA, 379 bp, Zea mays
tgctggcggggcgagggagagcctgagcgccattggattgggtggaaacggagcccaatggatggctcaggcttgcacactggcagtagctgggaatggattagtgcccccggggcagcggggctgcctttatatcgttaaacctctttttttccagcttctagtcccttctgtaacctcaacgccactcattctcgtcatcttcttcctgctccgtggagccctcatcctcatgtggacatcaattgaacagattaatttgcttatgaacagatagttcaattctgaatacagtcacttgcagatcacagcattgagattttaaggcacataaacatatttgtttaagtagcatatgatacatcactccaaagtgcag

SEQ ID NO: 8459 - DNA, 377 bp, Zea mays
tgtaagtaactaactgatgttcatagggatggcttgtttgttgttatccgtgcgtgctgctggacgattgtgctgatgcactctcctgcatgctggaatcctgcaggaacagaagtggatcatagctgtgctgttcatggtgcctgtttatgcctgcgaatcggtaagcactagcagctagcgggtttgtacgtagtttgcaacccatcaatcttgagttcttgacatgaattgatatccaatttcctccttccagataatctcactgtggaactcgaagctctctctggcctgtgatatattacggaattgttacgaagcctttgctctgtacgccttcggacgatacttggtggcttgccttggtatgtaaagca

SEQ ID NO: 8460 - DNA, 356 bp, Zea mays
tgctcttcatcgggcgctagccgccagggggccggcgagagagcttcagtataaaaggagaggacacgctctcgagctcatctagagagctcggacgacgtacttgtagctgcttggcgcgtacaagctagtgctgcagtgcttgctatacatactgctagtgcatgcacttgtgtttgcgtacgtacgtaaacaccaggcgcgcggccggtctcaggcccgcaggacacagctcacagtactcctccgatcctcgtgtgtgattaattccacagagcagtacgtcgtagatagagatcttgatactgtgagtgtggggtacgtacggtatggcgccagcccagcatcaagcagca

SEQ ID NO: 8461 - DNA, 454 bp, Zea mays
tgcaggatgacccatccagtgtaccaggatatcccaatctcctcgattcagtctggaacgaagcaccttgagaggtactggcagaacccggccgtgcttgatgggaggcaaaagaggtactgctgttggaggattacccacaaacttcttcaagaaaagcacatggaagacattaagaatctgagaacgagggggcagctccaagcgataagagacctctccaattttctccagcatccggaacggcccatagaacataaggccagcttgcctgaggacctatcagtaatggcagccacgtgacagtgatgcaatctcaaccacacccaatcacccatcacaaagaagacctcccaatgacccgacatggcgtgtcttcatcagctcttgggcatgacgcagccggtccctgatttcttacaaaaacacgtctctgtcaatcaggggggtcctc

SEQ ID NO: 8462 - DNA, 388 bp, Zea mays
tggtgacccatccatgcattcaactaacaaaatctacatcaaaaaacaagtatcataaaaagctaacataacccagaggacatgtacatgtgggccatttgtcccataccagcatatctagtcaaggaacataatagcccagtatctcagagtactagcatttgacgttagtcaaaggaaaggacaacatttcatccaaacatcaattacaggtctatagtaagaaacaaacaagtaaccaaccaataaccaactcacctgcaacattagatttgcagggccctcatttacgtcatatgggaattttccagtagcacattccaatattgttagtccaagactccaaatatcagcagcataagaatagttctcattacgaattctctca

SEQ ID NO: 8463 - DNA, 378 bp, Zea mays
tgcatcaagtgtctgaatgaaaatgaaacaaacaaatcagaggactgtaaacaaattaaagctaatagtgaaacaaactgggatgacaaagaatgaggacgtacattggaagcaaccatcccaacgatgctgacataactagggttctttgtgccatccccaataggaataaactggtaaggaactgggtaagggagcagtttaattgctgacttgaaaacatcaatgcagtaacccctcacagaatcaggggtgctgcctgacaccaatgccttgaagcttggtttaaccgggaccccaactcttagaggctggccatcgttcgggaacacccagcctctaggtatatcagtggagtcaccaggccataccacactg

SEQ ID NO: 8464 - DNA, 816 bp, Zea mays
cccctgacaaaaacaaaggacagagattcactttcctgctcctgctttattattaggaacagacaaaaagctcactgggttcatagtacaatattaggaaagaggaaagcaaagaaacaacacaaaaaattacaaggattctatccattggttcttgagagggagataactacccttcgttctatggacagccaaggaaaattcttgcttgtatttaactctatttgatgtcttagtcggatctattgcattgaaagtccagtcattttgtacgatctactcaaaattttgaactgcgagatataattgtgccttagtatattatatatcacattctacgtttccttcagtgaagcgggggcacaggacacagaccgcgcccatgcagtagtgcgccatcgaacggaggagggaggggcatgcgagggagagtggatctgtcgcgccgtcggcaatcggcatgatgacggatgggattggagcaggaagtggaaacatcgaaagagatagggttagagccgacgtggtgtagatcaaggtgataaggtagttttatcaggccggcagcagtttgtggatgggttttttacactggtccccttagtttcgccacggtactcgttgctacccttagtttttcttcttgctcagttttacccaacgctacttccattggctcagaaatccgcgtggccgccgtctctgtccattcaaacgtgacttacagcgcgggaccactgtgcagttccatcttaactatcgccgcgcgcccacgatgcgctgcgcagccgcctatgctcttcctggctactctgg

SEQ ID NO: 8465 - DNA, 383 bp, Zea mays
tgcaccatggtgaacagcacataaattagcttcaggtatactgaagaggtaaaagaaaaatcatcgattaaaaaaccctgaacttaccattgcttttgttttggaataaaaggaaccaataaagttgggcgtgtcttcctctttaaagccaataccagacccttcagggtgcttagcatcatactcaaatatacagcctgtagcataattaatcatgagcagaccctgcttgcgacagacatcagctagattcaaagtgcctacaacattggtgcggatagtgtcctgtttatgggtctcgcaccagtcaacatttggtctcccagtgactccggcagcattgaaaacatgagttggcttcacatttctaatgtcctccaaca

SEQ ID NO: 8466 - DNA, 409 bp, Zea mays
tgctaggagagttgccagacatatattaattggagggagtaacttgtatatataaatatcaaaatatatgtcatgttcatccatgatcaaatacaattaactaatggatcacatataatgaagaaacctagctatcgttttacaaatgccacctaatatatataatatatataagatggatcgaccggtaatatatgaaattgcattgatgggaaaaaaggttgattgccagtcgaacatctagctagccattcatggtaaaaagttaagtttctggaagcagatggctagctatatatatgtcacactcacaccacacatagctttcatctgcacaaatccagcgaacgatatcctccacttgccgacatctatatatcgatagcccagcaacatatgtataccggca

SEQ ID NO: 8467 - DNA, 792 bp, Zea mays
tgagaaatctttatcctcaccatgagaatgtttacctgatgaagataaaccatactttcccatgccaggagaaatgcaactgcgcttctgaatgtttttcagagtctcactggcaggactacttttgcttatttcaaactcagagggttgatgcttcatcacagggccattggattctttcttcattttctttgatgctcgcaggttatcatgatcaacccctacactgcttctcattcgacgtgattgatcttttccaacaatttctcctaaagaaatgtgaatctttagaaacaaaacaacagaaaggtattagtaaacttcaacaacacttaggtggtgcacctttatctgatgattccaccagcttccttttttccttcagtttagagaagtttctacttgaaggagcatgcagattctttgagggctttgacataccagttagtcagcgattgactcccagcttctgtactcatacttgtgctttcgtaaaagctgagtgaatcacctttttaaaaagaaaatagagaaagtatgtaatcgtgagagcaacgatggtatgcctggctgtgatggtgacggcccacgccctaccaattgttacatgaatgattactagtgctaagggcacacattggcatctatatatatctctgtcctataatagtatagctggttcactagaaaagtgcttagcctatttatcactgtcgctgcaccagcttaggtagcttcacgtcagcgttctggctttagtcacttgagttttttttattttgcatgcaatat

SEQ ID NO: 8468 - DNA, 741 bp, Zea mays
gaagacggaacggacggcatccagggatttcgtggggagcttcatccaattgttgccgcccatcaccggacatcgactctagggtggagcgacgcggcgagcttacgggacagcggcatcagcacttgggacgaactcgggaggatcctggagatctgactatgtaaatgcggattactagcgtgcatggttgtgggatgagctagtatatacagaattagttacctgacattacttaattaccgacggtcagcctcagtttgtacagcacagtggttttacagttagtttctcatgtggtttatgaacacgtacgtacgagtttacttgtgcttattattaatcaaaagagtaaagtgcatggaaggttcataaacttgcacagctcactatcttttatcagtgcatccatgtaacgggtcatttctcccattgtaacaccaaattctttcagtcttcgcacctgaaatggcaaaaagagatgttgcaaaaaggacagaacacttatgaagttgttactagtgcaaatataggtcaaggctctgtgcctctgtacagtgcctatcaggcttctctgctttttgatctcctgctggttctttttaaaaaatataggtcaagtcatggtgcaaattatattgcatatatagaactggatgtaaaaccaattaagatatagcaccacaatggtagaaatagatggtggtcattgcactattactaactaatacccatacatca

SEQ ID NO: 8469 - DNA, 419 bp, Zea mays
tgatctcccaacattaaacacccaaacagaaagaaagagggaaaaggccggtttattgaaaccagaaacacgacgaaaaacgaagctgaacactaataataggcaccgcctttgctcgtgcctttcaacttccaccaacaacatttggcgccactcgcgtgacgccacgcacgccaccgtgcacgcgccggttcaccggccggcgccgcactctcggccttcacgggccgcaccagcacagcctcgatccataaccaacagtccaacaccaacacctgccgtacgtacgacgtacgttacgtccacctcgatcgctctgtcgatcgtaggctcagaccgtactgaccgtactgactgtacgtgcactacaccagcctcaccggcgccgcggcagccgccacgggctcgaggcccttgca

SEQ ID NO: 8470 - DNA, 422 bp, Zea mays
tgatgtctcactccgactgcttttcagactgactgtatatgtgtcttccttttttttccctacagttctggaagggccaagagaagtgacaccaacggttttgaaggagatgaccggtttggaaggtgaggatacagacagtgtccctgtcccctctcttccactgcgctgtgatattctacactaaaaatttgagtgggttgtcagttattacatagcaggaagttaaggcagaacctcttctttccttttattatttattaatctaaaacgggaaaactttactgcaacattcttttgcaaatcatactcgagcaagctgatatagctgctccaaaaggaactttagctcgtctattgtggtttatcaccaactatggtataaagatacgatttttttcttgaatttgttaatttcttca

SEQ ID NO: 8471 - DNA, 374 bp, Zea mays
tgctcctgctggtgctcgaacaggttacgcgccacgcccaggttcgcccgctcggccgggcgcgtccgcagctcgaggccgccgaacatgtagtatgcgaacacgtacgaccgcgacagcacctgccgagaaaccagcagccgccggtgcgcccgggtcagccagtcgccgtcgcggatggcgagcgggcgctcgcggtccgactcaagaagccgcacccgctcctcgatggccgcccccagcttctgcttctccacgccgtacgacgagtcgccgtggatcttgaaccggtcgtggtagtgcttgtaccgctgcatctgctgcctgccggtgtgcacggtctctacacagatctcctcctcgtagcggttgca

SEQ ID NO: 8472 - DNA, 361 bp, Zea mays
tgctctctctaatgcatcagtgcacaggcgaagcagctctagtgctgcattacagcgggagtatgttataaatgtttgtattgcaagtggcatgacaatctgtttaacatagaacattagttcagatggtctcagttctaccaacagaggatcagaaccaaatccaaaaaccatgaagcacgaagcccacaggtgctcagaggaatgtttgattgagccttggaggtacactgactggaccatggccggagctgttcttgtgcctcctagctttcgagcatatagcctgatcagatcatggaactgtacatgttcgggctttgcactgcatctggcaattccaaacctcattaacattgca

SEQ ID NO: 8473 - DNA, 405 bp, Zea mays
tgctccaacaaaacaccaaagatttcgctcatccataagggaccggagatttgcataaactttttttttagctttcattaggtcattttttaaatattccgtattccaatgattcaccctaattacttacattgatggccgcacaacatcccacctgtccctttttagaataatctttaaaacagacttcactgaatttgcccttcctcctgtacaagtgttttaatgctcctttgtaatgtatgcattgtcgatggaatatagtcccttcttttttttcctgatcagctaggtttttgtttcttcttcaggaattaggtttagtaatctgtactgtgatcctcaaattatccctggaggccacaagatcacagcaaggcaacgatggcaaccaacaccaatgca

SEQ ID NO: 8474 - DNA, 373 bp, Zea mays
tgcaaaaatttgttcctattttttgaagcgagcaaaaatgtgttccttgtcaagcaccaaatagcacggacggatctactcgctgttggaccaaatctgcatgtcagccccatccaaatctgcatcgtggcgctgagggatccctgcggaaaaacgtcgaggagggagacacagtgggtgtggcggcgttcaggccgtgtgtgcgtcctacgggcctgccgttaactccttccatgcgtgtgtctgctgctcgtggctcagggatggcccccaccttgcatcacagtggaaaggtcgaaggtgtcaggctaggatgagggccgtggcgaagggaggtgcaagcggcaaggcgtacgaagggaagaagctagca

SEQ ID NO: 8475 - DNA, 384 bp, Zea mays
tgcctgaggaagtacctcgaatctgaacttcagaagaggtacaaagaagcagctccagctaccctggcattgttagagcagaggtgcactgatgtctcaatggacctaacgagactagactccaaactacaagcagcgtctgatgtctctcagctccggagatcggcaatgcttcatgcagcttctatttgcacacacttggtattacaaacacaatgcaacttattaacactttcgtttatgttgctgacactagatggacttcaactaattggtatttcctttcgttaccaaagcatgcattacttgatggatctgctgatccagatccagaaatatgggggaagactacggaggaggaacaaatgcatagtgctattggca

SEQ ID NO: 8476 - DNA, 319 bp, Zea mays
gcttcactgttaccatcagcatcctgactaggatcaggatctactacaccaccatgattttcatcagcatcaattggtgaaacctcactcatgaaaaaatgtgattcaagaagcttaagcatctcaaaatgcccaacacgttctttcgcgaagagactttggagcaaagaatcacaaattatctggcttttccgacgaggatcacgcagtttgttgcgtttgatatagtcaagtaaaaggggttggacgtcatatcggctgatcacagatttatcgccatttctcacatgagctacaaagtttatgagctccttagaag

SEQ ID NO: 8477 - DNA, 437 bp, Zea mays
tgctgtactgcgtgccgacctttgaccgcgccctggccgagctctgctcgccaccgcctccggtcgatgacccgacggcctcatcctgctgcagggatgacgtcgacggcgccgtggagaacaacacaaaggcaccaccggtcgtggttgcagaatcgcccgtgcagcagctcccggacagctttgccggcttcggccccacggacgccgagctcagagagttcgccgcagacatggaagcccttcttggccagggcctggacgacggcaacgagctggatagatcgttctacatggagagcctagggctaatggcgcagcaggcggaggacgtcggccggataaagatggagcccaacggcagcgtaagctcccgctcccgcggcgagggcgctcccggatttggccctacggagatgaagccagaggcgtcgtca

SEQ ID NO: 8478 - DNA, 759 bp, Zea mays
tttagagtgcggatcaaaggtctggggtatagcagaatactgcaagcgcggacaaaggggaaggttccaattgtagaagtatataatgccatctcttggaatataaaggcctcaccaatattttcggccaaatctggacattttttcccacaggggtggggttagtccgattcaattgagcggaaaggtccatatgaccaagtttttccattgttgaatatggaggctttaaccagtacgtaatcaaatttatgatacaaatcaaaattgagagcgacgaaattgcaagtttctcgcgggctcgttgatgcaggctgatacagtgcttcctgcctgccacgacagatgcagtatagtaggtgcaaacaaaacaatttgctagtgtaataaatgacctgaaaacctcgcccgatttgtaaagaagttttcttgttcaatgaggcattgaatttgggaggaatggcaagcctcatgaaaacttctgtatgccctccctacacgtgaccactaaaagaaagagttagacaggacaaaagtctgcaggcataatgaacgccaattagtttcctacaggaacttcaattatttctgctggttcagtgtacaatgtgcacagcatctgcatttgtctttgatctgaaaactgaccctgtatcatcatcatgcagtgctgtctgcaaatggggagacacagacagtcatgaaggggattacccatggagcatgtgactacctgctgaagccagtgcgtattgagca

SEQ ID NO: 8479 - DNA, 379 bp, Zea mays
tgaacggaatggtaaattcctgggaacctctcgatcaattcccgacaagtagattgcgacgaaatcaacgtgcagtgtgagcaatccctaaaactaacaaaaagaagtgttgttccttttggttagggtctgtggcttggcatcgtttgtggcagcctcaccaagcttgtgctgctcatgtggatcacactgcggataaactgggagaaagaggtaaagtcatgacctgtcacgttttgtctggacagtcaaatgtgatgccgcatattcttgtttctcaacaaatcctccttttcttttcaggcaaccaaggcaaaagaaacggtgttcagttcatctcttcccgtagcatgatagagctgtatcctatatatgtgca

SEQ ID NO: 8480 - DNA, 807 bp, Zea mays
  unsure (1)..(807): unsure at all n locations
tgctttaaatgtatttgttttccacgtacctatctctggtcgtcgtggtttgaaggtacgtggtcgctgggggtcctgagcacggccggaccgtccgccagagctctccggaccgtccggtggggtcccggaccgtcagcgtctggacggcggaccgtccgtgatgcgcagcacgggctcctgcatctgtctccctgtctgcgcttgccccccaatgctagaggctgtgatggtcaccttcagggtctcccctccatcgggagtcttctcggccaccactttcctgcaagaaactttacaatccccatcggcctttttagcattgccgatgattgtttccttgcctttgcctttatcggctgtgtttggccgaaccaagactttcttgccctcgaagtcgatcatgttcatcggaaagggctctgtatccactgaccatccttaattattatcagtcagaaggaaatatatagtagcatgcatatttgtcctcgtcgggcagtgcgtggccatgtatggctccattgtgtcgtagccttttgcattatattggtgatcatctctgcagccggccgtctctgtctcgtcttcaacaacaaccaaccaaccaaccaaccacgtctgcacatcaattcgaacgatggcgcgtttgactgccagccacaagcactgcctctgtggcgtctttttcaaaccacaactaanacctaaccaaataaacagcagcaataatgcctatgtggccctaaattaaggccggggcgggaagaataacaccggagcaagtacattacattcgtcccccgt

SEQ ID NO: 8481 - DNA, 827 bp, Zea mays
agcttgtctttgtcatctgtattccctgcagcagggttgctactatggttttctgaatgacatggttggctatgtttcaaagttaatgcaccatcacgccagacatcagcagcaattgaagattgcaaagacttgtttgaaccaccatgttgtgtgccaacatatgttgctctaaaaccactgacagaacatggagatattaaatcaccattgcaggaaacatttggatggcataagttcgacggatcttgagagttgagaggatcaactagaaattttgatgctctacattcaggcatgattccttggcttactccagcgagtggtaataaagttgaagatgcagagataacctcaaaaatctggctgatagtagaattttgtggatatgtctcttcagcatttttaagactatcagaagtgccatgatcagtaggactagcagaaatatttggtgcactgagtcccggatgcagcccagttgttcatcatctacacccccaaataggagggcacctgacttgtacccgcaagacttggcgtagtctttaagttcttctatttcctccttcgtcagtttttgcccaactaagttctggaaagtgtatgcttcgtcgtccgaagggtcttcggctatttcttttcctttttcaggcactgtggccatggttttttcagtagtagcaccagtttcttccgcggccatgtcttccaaaatcttgttgatattcttaatcgtggtttctaagtttgtatcttcggctgtagcggcttcggtagccgcgacctccgaagctacgccttcaacgattgctgcaccttcggca

SEQ ID NO: 8482 - DNA, 424 bp, Zea mays
tgcatgcccgaccgaatccagcagtgtctgagtgtgcatgatagagacgaggtcgtcgtgtagccagcccccggccctcccggcccggccctctgcaaggctggctgtgtgacatgcacctgaaatgatgaatgcgtgagttgttcatgcgtgttcatccaacagggccgccacactatttcacccctcgtgcttaaaaaccacaccaatttcccccctcttgtattccttattatatatagacggtttgactcatcagaatgtatactgaggtggaaaggacagatcgaggagtaaagcatgcatgcagtagccagggcactagggcagcggtgcgtacgatacgagtcgttgacgctcggtgactcaaaacagccgcttgtactttagcctgcgtggccatgggccgcttggtccatacaca

SEQ ID NO: 8483 - DNA, 309 bp, Zea mays
tgcagcaaaagtaaaaacctgcaggttgatgaaaagttacaaggcaggacacaatagctacctcacaggtaagatctaacaaaaaaaaaactcaacaaactaaatataggaatcatacataccataaaaacacccttccaaccagactttatattattaacccgactcagaaccatctgtgagacgcacctaacaatcagctctcgtacctctggagcattgctcctctgcataacgatcacaaaaggtctaaggaactcattttgaaagttatagtttgccagttcctccctttcaagaaacttcatg

SEQ ID NO: 8484 - DNA, 352 bp, Zea mays
tgcaactgtagccccgttggtcggattgaataaatgaacgtaagatgccttcaaagtctcccctttatcagccctatttattggcaaaaaatgtagaaagattggtcagtgcacagacaaaagagagatcgctaagaaaaataccattcacttgttaaacttgcaaaaagaaaaagtaaggagaggaaaacacaatcagcagaggtttaactgcttacaatatcacaagcaatgcataaatttacggtcatgcctgagcaaaagcgagtaaacttgcggagcttacagtagcaaggaagcagagaaatcagacttgttgtatccaacccctgagttgtatttggtaacagca

SEQ ID NO: 8485 - DNA, 363 bp, Zea mays
tgccctgttggggtttatgtgccctgctccgtagtcgaacgggtcagcgatctttctgggcaatccctgtgccagtattggcatgccacgctcgtcactcacagatgcttcagccatgcaacaacgtgttagatcagacaagatccatatggattagaactctgctagtagtgttgtgaattattctggtttggcatgagctggttacctgttgtcatgatggctgatttcagtgcagccggggaccaacttgggtgcagtgctttcagcagcgctacgatgcccgacacatgtggtgttgccatagatgtccctgagccaaatgcatatgcatctttcacggctgctaagatgctggctcca

SEQ ID NO: 8486 - DNA, 598 bp, Zea mays
tgatatcaccaaataccttcacatgttttactcccatactatttaaaagttctaagccgaataggagggcctcatattcagcttgattattagtgcaataagtttttaatcggctagagaagtcgaaggagacattacttggtgaaacaagtacgatgccaattccttgcccttcattgcaaaccgatccatcaaaatataaagtccaaggagtaatagtgaggtatgacatgtctagttcatgaatatcattaacccgatgttctacaatgaaatccgctatgacttggcctttcatagatttcaatggttcataggccaagtcatattctatgagtgcataagcccacttaccaattctaccactcataattgggttatgcaacatgtatttgatcacatcggcttgaccagaaacagtgcaatgactagatagtaaataacatctacatttggtgcatgcataaaacaagcataagcataacttctcaataaaagtgtaccttgtttcagcatccaccaaccttcggctcaaatatgtcaccacatgctccttctcctcagtttcttgtgtcagaacagccccaatgaccttatc

SEQ ID NO: 8487 - DNA, 420 bp, Zea mays
tgcccaacagaaagattgtcatttttttacagcatttaagttgttatattacttagcagttgaactgaactcctgattggtggtttcgttgtagcatgaatcaccagatggttaaaagtatgaatgcaaagtgcgactgtactaaaataactgtccgcagatggctaggctgttagtcttacctggatgttattatgggcgttgtatcttagccaactcttatgaaagcatacgtccacccgttcccaggccacttgtgtaaggccacggatcatcacctctgtaataacagatgtcttaatgcacagctatagcaggaaaccgactgcagttagatgtgcagtgcacatcttactccgatcagtaattttgtaattagctaagcttacaaattaacaggtagcattcagcagcatttca

SEQ ID NO: 8488 - DNA, 388 bp, Zea mays
tgctaattaatattccttctcttctcttgcttccctgcacgtacacgacgacggccggccgcgggaacatacacaccggcctctcgatcaaaaacacagtaaagtaactgtaatctgctggatcttcaagtctaatactgtgggtgactagctattagtcaataataataatactaagattaacgagggaacagtcgtttgcacggtcgaataaatgcgcagagagactgttttgttggcttttacacgttacggccggcgcccgtgtacagcaacagctagctagtgtagcagctactactactacgtactagtggctcggtcgatcgggtggcagacgatggcgccggcgccggcgccggcgcgcgcgcgcgcggccgccgtggca

SEQ ID NO: 8489 - DNA, 357 bp, Zea mays
tgttgtaaacagcagtcagtcatcatctcttggaagccaagggtagtctccagcagtcaataaaggagcggtctcccttccacgatcagctaagtgcaactggcatcatcatagcctctaatttgttacgcctaataatccgttgttgttaggctaacctttgagccttctatgctaattaagggggttcatttaagtactcgctgattctaatgataaattggaactacaaggttatatatatatatatatatagcttagggatcttcattctaggcacgcatcacaaaagtaaacatcaatcatcgattaacaaaaacaaaacctaaagacagtaacattaactaaagttaccca

SEQ ID NO: 8490 - DNA, 443 bp, Zea mays
cccccgtttatgaatgctctatcacactcagtacgcaccagtggccatgctcaaaagttttcagttttgaatggcaaatggctctatctgagaactttactggcttgcatttcaaggatggcacacgcagtgcgccatttattccatttcaatcgactgagataaacaagtaaagagaaaggagggggaagaaatcttatctattctgtatacacagcttttaacctagagacatcaaagagatgcacatcaagtatcgctagctagtctgcgggtactccttcacaacaacacctccttcaaactctatgggatccggaaaatcgtcccgtgaagccctcttgaacgagaacgagttctcttcgtcctcgtcactcccctcggtcccctgagacttcgctgtatttttccgagcaagtgcttgccccgacgttggcatggcc

SEQ ID NO: 8491 - DNA, 696 bp, Zea mays
aggctgggtggggaggggagcgcaagcaacttcggttggactgcctgtactgccgtagcgggctagagcagggagagacaggcagcgacatgttcatccgaacattggatgtgttcctggacgaaagagagatcggttgagacacagttcacaatatgtaaattgatataaatctgacagaaggagaacatacaatgctgcgatcctgcgacttgatgtcgaaggaataggggatgttggtcctggcaagtttcttccaaggatatcaggatctcttaaaggagataaacttctgtatgacgaagtttcaattttcacctgcaagagttgtggtcagcattctgttcgttgccctggtcacttcggtcatattgagttggcaaaaccattgttcaatcctttgctgtttatgagtctgaaaaaccttctccatgtcacgtgtttccattgtcacaagttccgcttgaacaaggaacaggtgagttcattttcatcttgctacttaggttttcattttgggctaagtttttgcatgccactgcacaatcttattgtgatttcactttcttaggttgacagatatgtgaatgaacttgaacttttagtaaagggtgatattgtctgtgctaaaaatttggaagactcagtagaagaagcatatctttccaaggaagatgaaaacatgaacaagaccac

SEQ ID NO: 8492 - DNA, 344 bp, Zea mays
tgacaacttgtactgtagctttagtaatgtgtaccagagctgatgaatgtgaatgatgtagctagttaatattactgggccaataatagtctaagagtgtgttcagccaagtgcaattctaaaacattttggtcaatttgacggtccaccattgatactgattcttttaggtcaatggaatgtggaccaagagcaattagcaatccagatttccttagcacaaatcagttttcagtttctttgttagcactctatcctttgggaggaaagagctgtttagacttcagaaacatatcacaacaaagcgaatatggtaactatgcttgattggcagtaattgactc

SEQ ID NO: 8493 - DNA, 327 bp, Zea mays
tgcacgatcgagcttttctaggctcgtcgtgcgacatgcacggccggcactgcatgacggggaagtggcccttgacgcggtcatggcgcgcagagtgcaatctcctgcatgcccatgattctacgcactattacaaatatggttaagccataaacaagctaactaatgcacacctacatgctgataaacattgacacgattacagactggatgctgctaactcaacattcacccccttaatcttgtcaatcttcaattctgatgatgcctagctgcctccttagctctgcaaaacggatccttccaagtggttttgtcagtataacg

SEQ ID NO: 8494 - DNA, 421 bp, Zea mays
tgcagcagaggtacgacgagtacaggaatggaattggatggaaataggcaccagatccctattccccacaggagtcagggcagaaagaaaggaaacaagaggagaggacatgggcagagactgcaagtaacaactgagaggacaaatgaagggatggattatggatagagagtactgtgagtgagcagaccataccttgtgttggatccaagaagatgctctgctgggccgccgccgccgcctcctctactgctgctgctgttggagtcggagtcggagtcggagtcggaggactccatctccaggtccaggtccgccatcgttgtcgtcatcttcttcctcatgctctctctctccctagtgtataggagggcggaggtgtcttcctcctcctcatagtcatcctcggcctccatgagca

SEQ ID NO: 8495 - DNA, 411 bp, Zea mays
tgatcaaagcgacgtgagcaggaggagcaaccatccgcggagcgattgcaacttgtcgaccggttccagcttcttttcgacaccgtatgccacgaaaaatgaaagtgacgcaaggtgcagggcgaggttgggagaatcacgccgtcgacccgtcttgcagagttcagcgaggcgacgccgcgacggtgccggtgcgggcttccttctctctctccccccagtcaagcttgccgccgcgcgctctggccttttggccacacacaggaccggttcgcatcgcatattcgcatggttgggtaattgggttggggattcctcgctcgctgcaccaagccaaagccaaaaaaaaaaacgtttccattgcacctactggtcgtcaacgttgcattgcaatgcatcgcatcgacagca

SEQ ID NO: 8496 - DNA, 386 bp, Zea mays
tggtaaaagtcattctaggaaaagcaaggcatgtaaatatatggtattgaaatgagaaaaaactaatatgcacaagggttaaatcatacttagaacttcatgggctttcaatctctccgatggacaagggcagagcatttttcttataagatcctttgcgctgtccgaaatcatgtgccactggtctgattcaaaatcaaaatgcccattccgcactttgtcaagtactccttcatgtgtatctggtacaaaattaaatggatgacttgagcacatccagaaaacggcagtgaaagaaaacttcaaatagtcaaatatcatgtctaattaattcacctgcccaaaatggtggcacgccacttagcagtacatagagtatcactcca

SEQ ID NO: 8497 - DNA, 361 bp, Zea mays
tgacaagccattctcggcgcagaaattagttaacaagctagacgaacccgccgctacctgcggagaacctgcgggcgacgcggcgcggggcccacgccgggcggcggcaggcggcggcagagaggaggagcgggttgagccggcggaggcaggcggacgaggagcatgagaggagagcggaggacgggcgcgcgagcgccattggcggttggcgcggcctcgcttgagataaaccctagtgggcgcgcaggagggctcggatgccgctatcgctgagagggagcctgtgagggaggggtttggattcgggataacgccggacggcggcaccgcgggagtgtggtgctgagcagcctgagca

SEQ ID NO: 8498 - DNA, 385 bp, Zea mays
tggtagtactgtgcaataacctggctggaacctgaaattgttttgtgcgccatgaccagattagcctgcctgcttgtgactgacgacacacactgcatcaaagaacacggaaaaaggagccgaaaatggcacctttggagaagttgagggtgaaggtgggctggtcggcgccgaggtagttgatgtggaagatgagctcctccggcaggtccaccttggtcctccagatgcaccacccgatgccggcgtagaccagaccatacttgtgtccactgacgttgatgctcttcacgagcggcagccggaagtcccactccagttccgggtacaggaacggcgcgatgaacccgccgctcgccgcgtccacgtggatcggcgtgtccca

SEQ ID NO: 8499 - DNA, 857 bp, Zea mays
agggaaaggaccacaacctttggtggcaccaaaattttacttccccaaagagccaagcccaagggaggggcaatgccataagaaaattttcaagccctttctgggtttttgtgggaaaacaccacccacattaagccatttaaaggagtttttcccaaattacgaaacaagagtccttgcgcgagctctagagttttaggcctggtgcgttccctacccacaatatttgagggattcatgataacgaatataggaggatcccgaccaacaggatagaggcatgaacagccgctcatcacaccgccaacccagggggtgtccatccaaaaagggcagcaagggcctggacatgagatggagggaggggctgctcaaaaagcctactataattatccaaggcctcctgactgatgcgttcgctttcatcaatcactgaaggcaagcgctagtgcgctactgaattaggcagtagcaagcatctgcttgtacgagacgatgtgtcctagcaatgttatccagttgcactacagaaaagagaagcgagcctttctgacaggtctttcaaaaaattatcattttttaagagaagtttgtcttatccacacaatccatccatattacgcttcccctagccacttttcgaatggcttaaaagaataaatttaaaaattaagcactaaagtggacaaagcaggttttgaaacaggatgcgatagcatatcagattttttttttcctttccagcatagcaatgacctaaacctttgacctacacttccttaaagtacaaatagtggtatcacagtcaatcacctgatcaagaaaagaagccaggttccagccaatagcatttacca

SEQ ID NO: 8500 - DNA, 420 bp, Zea mays
tgctcttctgtaaccatcttatcttatgcttgggacatgttcttcttgtctgcaggaaggtgtaggcatcggtgaagatgggcaagaggagactctgctaatgctggagccagagagctccttcggcgagatctcaatcctctgcaacatcccgcagccctacacggtccgcgtctgcgagctctgccggctcctgcgtctcgacaagcaatccttcaccaatatcctggagatctacttcgtcgacgggaggaggatcctgagcaatctctccgaggtacatacatacatagcctcagacggccccattgaatcgaatcctctgcagtggagtggatgatgtcccctgacgtgacgtgacgcgttgatttgtgactggctgggctgggtgcagagcgagtatggcggacgggtgaagca

SEQ ID NO: 8501 - DNA, 431 bp, Zea mays
tgagccttgtagttttttttatgatttcgtgatgtttgtatgtgaataactagagatactactgtggatttctaatttctaaaattgggtccgtgagatacttgaagagttccagttcagtcatgaaataattagattaagaaacaacatgatattttcatattcttatgaacaaaaaaacaaacatatattggtaaatttgtgtgctggttataattgggattacgtgtttagaactgttcaacttcttcttgtctgttttattatgttattgcttccttgcgttgcgtgttgaacttcagtcatgttttgttttgatatgtaaattcttcaggtggctggagttcctggtgtcacagaggctctgtttctggctaggcaagctgctttggcggaggggagcaagcctgctagcaccccaatgctttaca

SEQ ID NO: 8502 - DNA, 564 bp, Zea mays
tggagacattgctgtccgagaaatcgaggctggcgcaggaaaactcgacgtatgcccgtgaaaaccgcttcctgcgtgagattgtcgacttccatcagttcaccacccacgacgttgtctcattggatgacggcgacatggaaggcaccgaaccagaagaagacgacgacaacgacaacggcctcatatgtgctgagaacgttctgcctgcggttgaagaaaatccagtagacgaagaacactgccctgtcccctccaagctagaatctccagtggccagcctgggcgagccatcatcgtcccccaggtccagcgattgtcacagtgcctcgaagccagacgcgtcagcgtctgatgtagcttgatgatgcatgcgacattggtgactttgccatcttgtttggggtttcagcctcaacgtgcgcggactccttccccctcgtgctataaatgccgagcgtcgtgcccccattcaacgtaactcgggttgacggctccgccagggctattggttcgccaccatttgggaaatgagatccgccgcgaatgaatcatgggtacgcc

SEQ ID NO: 8503 - DNA, 219 bp, Zea mays
ccatcttcttctgataaactttcatcactactaggtcatctggataactcttcatgtgttgatagtagggaaggacagaaaaaagttatggcggccccagtcgatggtgacaccgaaggcgcaagagcaccaccatcttctgataaaacttcatcactagataatctggataatccttcatttgttggtaaggaagaacaggaagaagctgtggctcca

SEQ ID NO: 8504 - DNA, 371 bp, Zea mays
tgcaatgtctttcggcgcgaacgagccatcttcctcgtcccgcggaacctcgacacttatcttcttctcagtcagatgcctcgcgttgaggccctgatcgaacaccagcggtagcagcaccagcctgacgccgcgggcgaggccttcaataatggagttccagccggcgtgggtcaagaaccctccgacagattcgtgggccaaaaacctggcctgaggcacccagccgcggcagacgagtccgcggccgttgatgcgctcctcgaaaccttccggcaatccgctttcgccttcgttggcatcgactggttgcctaaatgcccacaggaacggcaggccggaagcctcgagaccgagcgctattgcctgca

SEQ ID NO: 8505 - DNA, 430 bp, Zea mays
tgccgaggcccagccgtgagatttggcttgtgtcggaggcagggtcgaagctcacgttgtagaagcccatcttcttgggtatgtctgtctggcagcatcccatgccggagcaggatccgtccgttaggtctgacacattctggcacgtcgagacgcacccactctggtagctcttgtcggtgttgtccgtgatgtaggcgagggtctggcaccctatgacggtgaacttgttctggacgtccgaaaaccggtacggggttccgctcgcgtcgaaataccaggtactggactccatggaaccagaggaggagtcgtagcagtatgtcgagacggggttcagcccccggaccgtgccatttatcaaggagatgttgagcacctcaatattaccttggaatggcctgtagacgccactttggacctcctgaca

SEQ ID NO: 8506 - DNA, 423 bp, Zea mays
ccaagtgagggttttggtgatttaatgacaaaacaaataagggtactaacagtttttgttcccagtgtttgattagaaggaaacatgaacttaaggaagctccaaggacttcatgcaacggacgtataaaaaaatttatgtaaaatcttgtgttgcatgatgtaattcttccttgttcttttccgcacaggtataggtgtttgctatagctcaagtcctctaattcaaaagctatttttgaaaaacaaaaatcactttaacattatttggttgaccatggtttgggatgagaaacctagagtgttcttgctgaaaagcagctgaacttcttcaactacaactgagctttccagctgaacttaacttcagaaatgatgagcttcttcagctgcagctgagctggacttcagctgagttgaactt

SEQ ID NO: 8507 - DNA, 410 bp, Zea mays
tggagcacttctcgggggttgttgaccgcatggtcaagctctcgggtcagaggaagaccgccgctctcctccgcaagtccatctttttcatcagcaccggcagcaacgacatgttcgagtactccgcgtcgtcccgtgccgacgacgacgacgacgaagcgttcttgggtgccctggtcgatgcctacaagcactacatcatggtgcgtactacgtactgctcactacaagccgcactcgtcatcaatcgccagatcctcctcaggccggctagaataaattctgcttctgcactttcacaaacctgcacgcagtcgctgtacgaaatgggcgcgaggaagttcagcgtcatcagcatcccgccgctggggtgcatcccgtcgcagaggctgagccggatgaagcagggg

SEQ ID NO: 8508 - DNA, 427 bp, Zea mays
tgcaatgtataatcggaatggtactcctgcttgtggtgcttttaatacgggagccgaagataagtattttttgatgagatcaaatgcttcttgctgttctgccccccaagcgaattcggcatcattcttaagccgaagaataggggtaaacgcatcaatcttcccggctaggttagaaataaaccttcgtaaataattcaccttgccgaggaacttctgtacctcgaccttacaggtcggaggtcccacattccgaatagacttgattcggtcagggtctatctctataccatgttcatgtatgacaaatcctaaaaacttaccagccgacaccccaaaagcacatttatgtgggttcattttcaaaccatactgacacattttatcaaaggctttgcgcaaatcagctatatgagaactaaactca

SEQ ID NO: 8509 - DNA, 468 bp, Zea mays
tgcttgcttgtggttaatcattgtttatctgcggattccggttaagctctggtaattaactgttagtagttcctaatctcactgaacacttattagctgccatgtgtatgtagagtccggaatgctccaaaaaaaatcaaagagaaattcaacttcttttcttagttattttttttacttaaaagaccctgtagtatgcatgtaaagaacaatgtagttaccagtttattgaaaacattgataacgacacttcggagttggaagaagttatcacaatcaaaccatcgttataatagtatgcattttttttaaaaaaaaataaaaactgtatctgtttctctttctttgttaagtcctagagagttataagactacattaatttcacggttgggcacacggtgaaaatcgaaaccgacgagccactagatctttctaggctcccccaaggagacagccattaaaaatca

SEQ ID NO: 8510 - DNA, 812 bp, Zea mays
tgcgggtgtacacggcgaagaacgtgatggaggagctggagcgcgccaagcgagagttcctgcaggcgacggtggtggtgcgcaagtccacgaagaagctgttcctgccgcgcctggtggagcggtacgcgagggaggcgtgcgttggccccgacagcgtcctcccgtgggcgcagcgcgagggggccgtcgccgtcgtcgacgaccggccgcagcaggaggccgcccagcggggcgtggggagccggcgcaaggccgtgcaggccgtagagtggctgccgtacgccaccagattccgctatgccttcgccaggagcatggtcgacaagccacactgctagctgcttcgcctcgcacagtcgcactcctcgcatcgcagtgcacaccagtgtgtgctcgacacatcaataatgaaatagcaacatgcatcccaaaaatgatattgccggttgacgcatacaaggcatgaattcattttccagaataattcactagtcacttcacatggacaaaaactgtcagctagtgaccacgtcccatggagcattcaacaatcctaagtgtcaaaagcactaacatgtgcagcatcgccccatctcaccaagccagaactagaaaaacatagctcctgtttgttccacatatatacaatgagtcaatgacagcaagtattgtctggctagccagccaaatatgtaatttcaacagcatagtagtaagaatcccatctacagcactaagcaatactccttggtgtatgcattctacccttctgccacctatggaaggcctcagggggatcctcgagagtc

SEQ ID NO: 8511 - DNA, 359 bp, Zea mays
aacaagaacaggccccttcaataggcaatcaagaaagaaacttctttctcatgcaaaatacaaaacaaaaacaaaatctttctacacgatcacgagacatgtgacgcgccaaatctattgctgattccaccgcagccagaagttggtaatcaacactgctccatacaattttttaaagcaaggtatagcctgcacaagcttcttttacaacctggaaacatctcaggatccaaccaagaacgacggcatgtggcgctctagtgccagcacgaggtccttcccctggctctccgggccaacgggctcaccgagccggtgcaccgcctccagcagctcccccctcagcctttggggcaaca

SEQ ID NO: 8512 - DNA, 343 bp, Zea mays
tgacaaaccctggccaaccttttttggacagggatcgtttaaaggtacaatttgtggataaaagttgtcacatgcaatttaactcagtgaccaactaatctgttcctatctacaattttttagcttaagagagccctgcgcggagttcttgttgagactgaacaccagcagggaaagagaagcatctacaggataactgggattacttctgttccattggctcaactgaggtacccaccggttcatatctcttccctccttgcctgtttggtctagtaccaagaagacgaacttattcatttccatttcttgtcttcagcttttcttgtaacgaaggccctca

SEQ ID NO: 8513 - DNA, 397 bp, Zea mays
tgcgcgcctaaacggcatatctgatgatgtgttcgctgcttttgtacaaaaaagacatggcactatggccctgtgtaaagcagtaaagtggtagctattgttcttctccgcaaggcatccaggtccaggactagcgctgctttttttatcctctttgatttgatcacatgggacgaccgaccctggctggataggagctttcctctaaccccttctttagcagctccagcctccagcagaagatattcctcggttgcctgctatgtctggcgtggtctagaaatccaaagagacaaagggtggaagagaaggagaaaaggcatcagcaagactcagtctcagaatgaagctttcctcttttctttttttcttttgcaaggacagaaggaagctttca

SEQ ID NO: 8514 - DNA, 349 bp, Zea mays
tgcaaatttcagatacttcagaacaaaaacaacccagcatttaagtccatacttgtattattacattttttataagcaaaaggaaaatagaaaggggaagtcatgaaccaaaaaatttacaacggccagtccattgtagtggttcaaatgatgtttttcatggcccatggaaaatcagtcatacctctgttatttcctaataatattacatgatttatcatcccaacatccagtgaataaagcaatatcatcattataattttggcaatgaataagcacatgagatgagatgagatgcaacggttatcggagttgtcagtctatacgattctgtctgttgtatgtgtca

SEQ ID NO: 8515 - DNA, 405 bp, Zea mays
tgaaaagaaatacggagtactagaataatatatatcataggaataatgaatcctttcccagcagagcggaaaaaatggtgtttattaattgttcaagcgcgtacatgcgtgtccgctgccattggctggctggtcgcaacctccaaaccatgtcacattcaccatggagaggaaaaaaagaagagaaagggagatatcaagacatcccatcagtgaccatgcatgatcaggagagatcaagacatcctctcagtgatcatcagcatcacgtacaatatacgtcgactgataaagatcggaacgacgacggcatcgtcgtcagacagcaactgatagagatcgcatgcaacggacaacgggaaataaaggaccctactaatagccagccagtggaaatacgtatca

SEQ ID NO: 8516 - DNA, 355 bp, Zea mays
ttggaatttgactgtagaggttgtatatggttcgtattttctgacaacggacaagcaaattattatagtaattataaacaaaaacacctcagcgaaggtgcgtccagcaataaaaggatatgccatgcttagttaataattgtgttcaaggtggattacaattgtctattaggagaaaagatgaattcgattaggatgtacagtactgatagcttgcatatcaaacgaaaaggttcacatttttgaaaccctgcagttcaatagattggttcaccaaaagaagagcatttattacatacattcgacaggcctccagagaacaatgcaaaagagaaaccctctctctgatttatca

SEQ ID NO: 8517 - DNA, 445 bp, Zea mays
tgttgcaggtccaatgatgacctagaaacaatattaaaactgtttaccaaaaataagggacaatatgtagcaacaattttttttaataaacttgtctagaaggatgtaatcatttattgatatgaaactgtactgtctagatgataacttgtaaatgaactatatggtgtggaaaaaaagtttattaagcttagtctttaccttattattagcgcgtgcataactaattagctgctttgcatctgattcaggaacaccctcagcgataatggctacaacccttattgttggctgcttcaaagctgacattgaggaagcagcagcactgcaaaatcctcaaatatagttaacatgtagttacccaagaccatgcgatctctttcgcaaaagaataattggaataatagctgacctccggaaggatgcaaagttgataaatacatca

SEQ ID NO: 8518 - DNA, 405 bp, Zea mays
tgacatgatgactaaacatattcctagagctacgtttgagttttgctagaacttagttggtataattgtttaagcctagtggctttgttggcaccatcagtttattccttttattattcagaaaattgattacaagttattgggtacaagatgaaatttattttaaggtggagattgttgagtttatgatccaaattctgcttatggaggtcatgttggcaagcggaatgaaggctcgttgccgagaagcttgggccggaccgccggagcatggtggtgagtgccttcttccccgctgctatcacaggtcacttggcaatgttggcatgcatgatatttgcagggatatatccttttcctgcttccaaatgtatatgctacatccctcagcacgagaccagtgca

SEQ ID NO: 8519 - DNA, 448 bp, Zea mays
cggtgagccaacggtcggccagggtcaacggtcggccgctgattaagtgtgacattatgaagcctattgaagctgtactaaagtcatctgacgaagaagaactagtatcagtattgcaagtggtagtcaccttaactttcgtttctgatcatgttgctcaaaagatgttgacgaaagatgtgttgaagtcactgaaagcactttgcggacacaagaactctgaggcaagacgaactggatttagactctggttgatatgttgtttggataaccaccagagagctcatcattatttgcttccttttgttaggtgcaacgtctatctctgtttgcagttggcaatttggctttctgcttggagactcgtcgcactctcatgcattctgaaagtttgcgtgaccttttaatccgcttaactatttcacaagaacgtcgtgtcagcaaagca

SEQ ID NO: 8520 - DNA, 432 bp, Zea mays
tgccaatccaattacaggatgctatgacgctcttaaggttcgtaaacatgtatttattgatgcaataattatccactgtataaagtataaactgttctagctatacaggcaagccaattaatttgacaaaaatttcttttgttatttgcaagccaaactaacttgtatatcttttcttataaattccatttcaagcatatgttgctttctgataagtcatatgcttcaattcacgcggttggttatacagttcttggtggtgattattgaaattgtatttaactattttacaatatttagaaagcctatttggtttcaatagagttcatgtatcttttcattcttgatgaaattctggtatagagtttgatgtttgaagcacccaaatgtaaaatgattcgcaaaagttgtagtagagattcaaataaacca

SEQ ID NO: 8521 - DNA, 426 bp, Zea mays
tgctggttcaacatcatacaaggatagagggcctctgaactggaaagccttgaagaccgcttttgttaaggaagttaccgggtttatttcgtttctatctgcactaaggagtcgacgagcagacattttccagagatgcgagtttctaaaacttgaaaatatacattggtatgggagtgatttatctgagccatgttgggaggatcctactagcaactttctttgcttgcacataaatgcagagctggacgagaagctaccagattcgactggaggtgatttgtatatctgtttcaatgcaaacgaggagtcagcgagtgctactttaccagctattgcagaaggatccatgtggctgcgcttggttgatacatcacttgcatttccaggtttcttttccagagggtctagtcatgaaacacacca

SEQ ID NO: 8522 - DNA, 399 bp, Zea mays
tgtgcgaaaatgtagcagagataatgtgcatacggcagctgtcgccgaacacgaagaccatctaacacggtgtcctcgatctctcacatataaggaaatcaaccacatcaaactctgaatgagagatcagtgcaccaagtagccagagctggatgtgagtggtggcctctctataacccatccgaggcagtagcgtccgtctcatgagctgatataagtacttggccgctggagtgaaatctgtcggagagcgtcgcgacccatctgtgaaaggcggtcggaacagggccgcgacgtgagctgtagctggagcaacaccaccgtgagggcaacgaggaggatcagaagtgccataacacaggctgtgaaggcgagtcgatgactcggtaaatccaaaca

SEQ ID NO: 8523 - DNA, 393 bp, Zea mays
tgatcctgcaagcaccgcactactcataagagactaacacatgcaaccaaaccagcatctcccacgaagccatgtgaagttgctcgccatctgccaccacaaacagctcgtgagctgagctcatggaaccgttgcagatggaaaatcatgccagagcaggtcactgtggccagctatgggcccatggctgccgtgcctcaatagcatgtgttgaatgcgacctctaagccactgtcttgtggctccgtgccgcagccaccttgccgcccacatgctgctgtcgcctgtcagcctgatcgtgcagtcatccaaacgcagccggcctgcagccgcacctccatttccgcaacccaccaacggtatcccgtggccagctccaagtgtgaagtctgc

SEQ ID NO: 8524 - DNA, 377 bp, Zea mays
tgaaggttccccgcgctcccggggaggcacagcgcgggcacgttgggctgcggccacgcgccggtcacgccgcttccgccggcgcaaggtgagagcggcggcgtgaacgacgcacccggcgaagacagtcccatgcccatcgccgctgccatctccatcgcgctgcgcgaccctgccgacgacacgtagagtggccggagctcctcaggcgtgtgcgcgaagaagcagacgcgcctcgcgcagccgatgccgtccttgcacagacgcgtccgatactgcgccgggtgaagccagctctcgaacaccccgtgcgcgtactcgcacatgtcgcccctccggcaccccgcccctttcttgaactcagggcacggcacgca

SEQ ID NO: 8525 - DNA, 344 bp, Zea mays
tgatgcctgcaatgatagattcaaggcaatagaaactgcagtaattctttaataaaaaaaatgttcaggaaaaccagatttgttaaatagactaccttgttgaagacctggtccctgtcagaatggacaagaccaccagcaaagaaagcacacccaagaaccagcagcatatttgacaatattgagcctagtagtgactgctggacgacccgaatcatcccatttttcagtgcgtatattgatataatcatttccgttgcatttccaaatgtagcattcagtagccccccaacttcaattagatggaaaaggaaaaaggttacatctttccaaaatactaagca

SEQ ID NO: 8526 - DNA, 378 bp, Zea mays
tgagacttaaaactagactttggatcccctgatatctagcaacattactgctactggtgtttttttatatctcatttgttttctcctttttgttggtgcgtttggggctaaaaggcttggatcgttctatctaaccatttcctgttcacttctttatgaaggtggccgatgtttcggaagcagtgcggcaatatgcagacgctgtgatgctatcagcagagtcagctataggtgcatatccccaaaaagcgctatctgtacttcgtgcagccagtgaaaggatggaatcatggagccgtgaggaaaacatgcagaaacttcttccacggcatcagcttgcaattgcattgcctgaccggatctcagagcagatttgca

SEQ ID NO: 8527 - DNA, 418 bp, Zea mays
atttatacacacgggaggtactcttcggagcaggtacagcacgaggagcacgacgaagacatgggcaggttaattaggttgggacggactggcagcggagcggagcatgggcatctcggaccgggaatagagttcggccgcctagagggagggaatattcgccggcgtccgggtttatgccgcggcatatccatctcgatttccatgcggttccaacgcccaggtccagcattgccgctgccgccgggttgaagcgcgcgggtcgcgtcgcgacagcacttgagcagcttcattttcttcttgggctcgcaaaaggagaagacaacaagatgcatcgggaaccttcttccgtagtacgtccccaccctcctgggctcctggccgccagcgccaggggatttcactttttttcttttca

SEQ ID NO: 8528 - DNA, 397 bp, Zea mays
tgggcgcctcaggaaagccccctccagttctcgtggtcatacatctgcgggtccgtctgctggtgctggtgctgctgctgctgctggtgcctcgcgcccttcccctggccgcggatctcccacaccacgtggtcgtggtcgtggtcgaggtcgtggccgtgggatgggtgcccgcttggcccacgggtttgcggctttcttctccatgtgccgaaatattgctgcagatgtccatgaggtggctcgacgtcagcgggagaccaacgacaacctacgtcgtcaagtttccgctttgggtactcccttcgcccctcgctctcctgatgtacctctccaccctcctcctccagatgtcaacgagtggtaccagcaggcatatggggtacctttttcaaca

SEQ ID NO: 8529 - DNA, 438 bp, Zea mays
tggagtcacggccggcgacggcgagagaaagaaagaaagaagcgtggcgttcgtggactcacttggcgcgtggtagaccacggaaccggctccggcgaagtcgcacgtcccgctgccccggcccttccgctggtagtagctgttgaacgcgtacgaggcgtgggcgaccacggtgttgggctcgaagcacgatccgccgggctgtatggcgccgcagtccgcgccgttggcacacgcgtagttcagcgctgccagcagccgcgcgtcgccggccgccgcattcgccacgcaccagctcacgttcgggtcacaggtgcctacatgacacgaacacaagtaaacaacacgttgccatgcataccactagaagtagaaattgagaatctgtgtgtgtgtgagagagagagagaatcggcgatggagatcgagaactcacca

SEQ ID NO: 8530 - DNA, 332 bp, Zea mays
tgcctaagaaaccatcattactggaataatcttttgttcttatttgtgcttcatttgataccagaatcttccccagtgcttgtgtagcacagaaggatgtcacagttctgctcgttagcacaactaggtgatataagcaatactcctaaaggaatccactgatgcaatattaggttaaagtttgaaggatggagatccgctagttttccatcttgcacttgaggaaaggcagttgtgctacaacattttacacaggcacacagctatcatcaaattctttaacaagggagcttacagtgtttattggcacatgaaatttctctgacttcgca

SEQ ID NO: 8531 - DNA, 410 bp, Zea mays
tggagcagagtcattcttcaggtcccttctgttaggaaggatttggatgcgctccttgtttgagtgctccaaatatgaaaaccaagcaggtaagaaaatgtaaaggcattggtccaatcagtaattccaagcatatttagggcacatgcatttaggagtccaagtgtccaacattgctagatcaataagaaataaagattgatgattcggaaaaaactgaagtagcttaaagaaattgtttgattgacaaattcagatagctgtacctttgaacttcctcttacttggaggactttcagtgtttcttctatctgcaggaatgtcctcaggaggcttggagccttcatgctggtcaatcttcccaagaagaaaggtgtattgagacttcaaatgcttctagtttgtcttca

SEQ ID NO: 8532 - DNA, 358 bp, Zea mays
tgctgtttgatagatttgtaaaaccagtattaatcatgttccagtgcgcagcatacctgaacatagctatgcttctgtaaatcaacaaatatttcaccacatgaatccttgcaatctatagtataaaatgcaatgtgtttgcttctctttcgacagttttcattaatcaacaactggaaaagaaaaaatacagaaacaagcatgacaaacttcctgtagagagtcactgaaatgacacaataaaaagtagaaatactatttccagagaagaatctgcacctttgttttaagagatgcacggctaagtacaacaatgtcaaacttgtcaaggaattctccatcaattaatgatggatca

SEQ ID NO: 8533 - DNA, 375 bp, Zea mays
tgacagattaaagtgtggtatgccccacccggttgcttgacccctttgtgatcaagagcaggagacaattcaacatctcctaactacatgtgtttttgcacgtcaattctggcatggcattctagccccttttaacctgggacaccttattcctagtcctgtggaggcctcctttgtggagtggtgggaaggagtgatcaatcagatccacaaagacaagaagaagggcttcaacagtgatatcatccttggggcatggtgcctttggcttcataggaaccgagtgatcttccatgaggagtccccttccattgcgaaggtgctgagatccttccttgatgagctcgcttgttgggttctagctggagccaagca

SEQ ID NO: 8534 - DNA, 348 bp, Zea mays
tgggaagacgacccgcaattttatcaatgagcggttggaggtgctgtttcccaagcctcttcaaggaaagaggcacccccaaatatttgcaggggaagctggcaacgacgcatggcagcaagttgtgaatgatatccagatttttcagcagcacaccggatggggaagacgctgctctttgccatatttgttttaagcccagaagcctctccaaaaatcctaaggatatccatggtggtcacaacatcagatgtcaccgggtgaaggaagattaccacatcatcagcataaagagatatacgagagtggtctgaatttcctgataacggctccaacaatcccacaaca

SEQ ID NO: 8535 - DNA, 423 bp, Zea mays
tgctgtcgaggttgaggtgctcctggaggagacgcgcggcgcggccgaggcgcagcatggtcaggttcgggtatgacctgcatagctactcgcagaacttcgacgatggcgatgcctagtcagcccggcggccaggactagcttcttcagtacgtgtagctagctagctaggagtctaggacctgcaggatcctccttcatcagtacgtgtaactagctatggccaggatattagtgtggctttaattagtgcttttgtcctgatcactgagatttcagtccagtgttaatttccggtgatcaattatctgctctctagctggttcacccagttattgtataaagaaattacttcatcttataattaagtttgcacaggaaagcaattctatgcttgccatatatagatcaacgatttggtca

SEQ ID NO: 8536 - DNA, 375 bp, Zea mays
tggtgcgtgattcaaagaacagcattgaaatgactgcaactgaactgcagaagaaccctatcaactacacacaggtctgtttttattagtttccagatcaagatttgcatatgttttagttcaaaaaaagatttgcatctgtttattttcttgatgcctgattgttttacacctaatcatgctgtggtgtttgttctctgcctctctgggctatataactccttgactaatttgtgaagctactaatctgaatgtgcagaaaaaggataactaatcggttaacttcaatgcaattctggactcttctaggcccaaatgaaattctctgctgtaacagtcaagagtataaaaattgatcatcctctttgcaaagca

SEQ ID NO: 8537 - DNA, 363 bp, Zea mays
tggaaggccgggaagccgcagtagattgggtgcgcgcccacgagcgagaacgggtacgtgatggtcagccccccgcaccgcgccggcgcgcagcccgtgccgttgccgccgctggtcgtctggttggtgttggtattggtgtcggcggcggcggccgtggctgagcctaagcgcgggaaggcggagaggaggagcagcagcgccgccgccaccacggcggtggtctgcatcgtgaggactgaggaaggaaaggataggtggtggttctagttctggttggcgtctgtctgcccggtggccggtgggcgggtggtggagtggactgcggaggttgtgaaaaaagagggcgtctgacgcacgcaa

SEQ ID NO: 8538 - DNA, 417 bp, Zea mays
ccccttatgagatagcttcgacttctgacggatgcagcaccagttgcttcactttgtattatttacattttctactgggaaacaactgctggatacttcttgccacagaccgtctccgttggtgtcatcttggcccagaaagctccactgcttgcaccaacagtgacgagtcgtccgtcaggtcagagtggcagcggctgaaggagaactcgggcaccttgaatttgtgtgactcagtgtgttgtaacgcctcccaccgctctgcaagtccatcgccttccagcatccggaccacctctgacatcttgggcctgtgaccagggaggaactgagtacatagcagtgctacttgcaccatctcctccagctcaatgcggtcatatttgctccccaggcccttgtcgacaagtatgtcca

SEQ ID NO: 8539 - DNA, 418 bp, Zea mays
gtttccatgctgctgcattgtgtgttgctccgagagctggaagaatgaagggctgtaggagacgtgctgcattcccatattgaaatgctcgttattggacttcgacatctcgcccgttgctatcttaagcctctccacttcttgcctcagtgcatcatttagagctgcatcggtatgggtattccgtcagtaaataacagtcatatgaggatcagtgcaatggttgcaaaatttacagattgttccagcactactaagtactagctaaccatgtgttgaccatggacacatggtacagcttctgaatataaaaaaatgtgtaagctacctaagatgaagctaggctgctgcgacaatgggacaccctcccacatgaacttattatgaaaaaaattaaataaatgctcaccgtcacgca

SEQ ID NO: 8540 - DNA, 439 bp, Zea mays
tgacctcatgggcgacggcacagtgaactacgaggagtcggagagcatggcggaggcaacagtgccggccgatggcgcccgctggacgacccagtttctgtgcatcgacgacgtccttgacgacgacatggacctggacctcgagtcctcgacatcgggagcagtggagtgatagtgtgagaaatgtaaccacgaacggttggggtggaaactgtagatcaggtcatgtttaagaagtactcgctgatgctctggacgaacagctcaagcttaagaagtgatcggtgttcaagctgttgcatggtgatcgttttgacgccattgctgattctaaccgttgatccttagttcgttactgtacagctatccactgtgtacagctaacgagttgattgattttgagaaccctgcttggcctctctttgctggcattgctgca

SEQ ID NO: 8541 - DNA, 354 bp, Zea mays
tgcggtacttgcacatgaaagggaggagcacccatgtcactggcctgcacggttttctcaagcctaggcctcttttcaatctggaagcccggcggttccccggagagttctccagaagccggtccactgttcttggaagatagcgaggcgccatgctcggcaacaaaagatgagaaaatggagctcagaacctgcacaggtgccgacaaagatgccagcttgtctgccattgctgctgccgttctcttcggctcatctcccactgcactgactgtaggggcaagcgaggttgctggattcagtgattgcaactgaggagacgccagccttactccggaaccctgtatcatagca

SEQ ID NO: 8542 - DNA, 366 bp, Zea mays
tgacacatttacactgtttaccttctgcattaaacagcccaacacctcctttgcacttgcagctttgccagacaattttggcatgatatcttatggctcattaggctgggtgtcctcactcctgctattgatgagatttcttttgctgagtggtggggaaaggtttttaaaaaagtgaacaagaacatgagaaaaggtttcaatagcatcataatttttggggcttggtgcttatggcttgttcgtaacaaggctgtttttgagaaagtgaatccttccattggcattgtcaaaagactgtttttagatgagttgatctgttgggagaaggctggtgccaaacaccttgaaaatcttgggcttgca

SEQ ID NO: 8543 - DNA, 372 bp, Zea mays
tggtttactttactagttagatcaaacctaagtgcttaagggcatctagcgtaatggttaatgcttccgagtactacctctaggtcctatcttctcgatccccctcgagggcaaatttctgacttggttaaaaaaatccctttgttgtgcctcacccgcccacccttcggttggtcgttgcagagtggatggggccacggttcgagaattttctcgaccgtaatcatgtttcgatctatttttaaatataatatcaggaggacggtctttctctctccgaccaaattttttttagatcaaacctaagttgagcatttcaccagacaaaaataggtaatctgcaatggcgataactgtagcctctacgtttca

SEQ ID NO: 8544 - DNA, 402 bp, Zea mays
tgcagcaccgtaaccatttgaaggatcaactgcaatcccgcaaatctgcttcagctctaacgttatctcaggttcctttttttggcttttgctcacatatttgattatgctatatatctgatttgagttgttgctgccacagaagaaacagttgttaaaattttcagttgcgtgctcctgttccacatgtgcaaaagtatttagttttcctaatcttacctgccaagtatgaattggactacattatttagttttatttttgctctaatttggtgtctgcctgaatttgccacctctatgaatattgtaagtttgtaacttggcataatagtgtgcccttttaaggtttccacctctaaagctctgatttactgttggaagttttggcgaaagctgctttca

SEQ ID NO: 8545 - DNA, 415 bp, Zea mays
tgctcgatggtggcaatccattggtgcacgcctctgtttctgcacatggtctgagttcagtagggtgttgctagagaggtttggtaaggaccaacacgagtacctcattcgacaactttttcgcattagacagtccacatctattgctgcatacatagagcaattcactagattagtggatcagtttttagcctgtgagtcccagaccgatcctctcttttatgccatgcgcttcacagatgggttgaaggatcataaaaaatctgcagttttaatacagcgtccaccaaacctcgatactgcttgtgctcttgcccaattgcaggaggtctcggagccgtcacggtccacgccagctatcaggaatttgcactcaccactgcctctacctcgtcctccccaagctgacagttca

SEQ ID NO: 8546 - DNA, 395 bp, Zea mays
tgcactataataagatgtgtttgtactgcaaacagtttgtactaatttgtagttcaactttttttctatcaagtctaatggagagataagattcgccttaacctccttgtccactggctaatgtttctaggctttatcttatcttttctgccaccccttaaagcaaccttgtggacctgttctagaagtcagacccttaaagcagcgcgcgtgcaatggccaccactgtctgaatttggcgctcaaccatgctgttctgttgaggcgattaaggagcggagaagtgccgctgaatacctttgtcagagcagtaggtggtgaactccatggcgatgaactctccacggttgtcagtgtgaagcacctggaggttgtggccgctctccttctctgca

SEQ ID NO: 8547 - DNA, 408 bp, Zea mays
tgtcgacaatcagccccaaagcttcgtctgtcagttcacggcagaaggaaagatccagagcctccaatgaaacataacacttgcgagaaattgcaagcgcagtaaggtctccaacctaaatgaaatgcgtcagatgagaactaattatgaggtggacatcaccaaaattggtcaaggaaacagcacgtgctaacaaacttaataaaatttcccagtcacatcgagaagaaacaaacaaaataaagagaatggcagtttaggttgttatgtacttcaaccaacgatcatggcctgtttggatttatggatttactaaacctggcatcgctaactattagcaccagggcccataaggctcaagtgcaagtggagagcttgaacaaggcaccaaaaattctagggtcccca

SEQ ID NO: 8548 - DNA, 194 bp, Zea mays
tgaagatttttttgggatagcaaaggtgtcgttttcgtatactccctttgggaaaggatgtagatagcaagcagtccttggaagtgcacaagattttatttaaaagaacaggattctgttccccatcttcagaagaaaccgtcatttatccatcattctgagtcaaacaaaatgtttagccaagttgtcaactc

SEQ ID NO: 8549 - DNA, 434 bp, Zea mays
tgaacaagagagaggagacccaaatataggcacgtgccttctcgagctggttcatgagggagatgaggatggagttcgtggtcttggtgcgctccttctggggtatcctcagccccttctccatcgcgtagagccggcctgcccaaacccgaccaaatccaaatcgaatcaaaaccctaaccaataggatcgattaggaacgaacccgacgaggagagagaagcgtctcccacagtagtacgccacgaggggttcgtgcttctgcagctcatcggcgcgctgcaggtagggcaacaggcccttggcgggctccgactcgctccccatcgtaggccgcagatgcccaagcgcgagcacggcccggatttggcggctgagatccccggagcttgaagatgacgggggattggtttgattggtaaggagtcgttgca

SEQ ID NO: 8550 - DNA, 482 bp, Zea mays
cgaattcgagctcggtacccctgatctctcctctgccaccattacccgctggcgggaagtcctcagctcgcgctgagcctcgtgcagcgccttctcccgctcggccttctcggctgtcagcttcttgaccttctcctcgagcctgagcacctgcccgttcgcgtcctcgacggcgtcgcctttcgacgcagaggcgagcttctccatctcgaggaagtcgtccatcacgccgatgtccgcggtcgcgaggctggcggccctgctgctcgcgccgctcctgtcgatcctgaactggtcgagctcggcgacgaggaccgaggcccatgagtcggagcagtccgactggcaatccgtcaccgactcggcgcaggccgagctcggagaacgcctgagctcgacgttcacggagggcctccgttgtgccgcggcctgcagcctcctgcactcagcttggagcttggccaccttcttgatgccctcca

SEQ ID NO: 8551 - DNA, 322 bp, Zea mays
  unsure (1)..(322): unsure at all n locations
ggacatgttggcactgtttacttttcttcggtaaacttcctggcactcctgctcgagctcttcgagtattctctccctttcactctgctcttgcccaacttcatcccatatcatctaagaaccaatgcagagtttcagtaagaactgagcagagatatatactatatttttgttnttgttggaaaagctttgtgtaccttgagttcttgaagcaagtatgcacatgaagactctggcagcgcagcgccgggagctttttcagccatactactgagtgatcccatctcacggacctgacaaactcagagcagaaattgctcgg

SEQ ID NO: 8552 - DNA, 441 bp, Zea mays
attcgagctcggtacctctgcattgcgctgtggtggccatggctgatctgtacgatgaggataagggcccatcgctaaagagccagcagtcacgccctggcctccgccacaagccctccattgagatatttaattatcaggtctccatgcttattttgattatacactaccttggttaattttttatcatctccatgggtacatttttttcttagttgcttaaactagcactatttcgcacaaattgtactagtacaagatttgatgtaaaattctaggcaaaaatgtatactgcaagggtggcattagtggtgaactggtgataacatgcaggcaaaggtcaccaaggagatgcaaggttcaaaatcctccctccctcatgtgtgcagttttccatgtgtcaagtagagtcagtacacaaaacatttgtgtcggcttgca

SEQ ID NO: 8553 - DNA, 376 bp, Zea mays
tggagtgtcgtttacctgttcatagtttaatcttaagtatttttaccatcaaaccattgcttgtatagttgagtttgacatgttaatgttataatctctcgtgcttttatgtcctgtatgcagcaaatatgccgttaacgaaacaccttagagtcgctattatcgatagcaatccagcgctgaagtcaagaagttacctgggcaaaaacagtatacctgattctagggtcagcaccgttacccctgcaaccatttctttcttcaagggtatgattctgaatcaactatgtgcatcatcgattcatcgtatttaattttagttgtatttcatcttgattcttgcaacggtatttggatttatgtttgagcttttatg

SEQ ID NO: 8554 - DNA, 453 bp, Zea mays
cccctgattggtaggcccgatcgaccggccggcgcacgatcatttgcgtacgtttcccggtttccggccggccgcgcaccatgatcgataccatatgatgccctcgtgcccacacacggccggccgcccggcccggaaactctgaacaatctcagagacgatcagggccgtttcctttccgcacaggccagccacagccacctctctctctctctctctagctcagctccttttgacgaggggtgcctgagctacatagctatctgcacgaacagtccgttggtctgatccacctatataccccaggcggccaggcccttgcttgctgcaagcagattttgtcgtctggtcaactcaccaataatcgttgttcctgcacttatcgcatgttctctctccatcaactcggcagtagctactagctagtttgtgcagaggctggctgaactagca

SEQ ID NO: 8555 - DNA, 321 bp, Zea mays
tggtgaatctgccgccgcactcacacagggcggctcattggatttggaggtcgatgagatccccttctgaacctccactggtttcggactgctgcacttttccctcgccggagaatatctctgagcgacgtcgccaccgtgtttcggctgggcggcggttcgttccggctccgtctccactgtaccgtcaccctgtgcaaaaaacaagttaaagattagctgagagtggaacctccaaatggactagaagaagggctatgacgcagccagactaattcgcacctgtggtatgtttccagattcgacgtcttcgcctaaaca

SEQ ID NO: 8556 - DNA, 348 bp, Zea mays
tgcatttgaatttccagcaactaaagcctcatgtctgcaggtccaggacccaggatgcctttctcagggtctatgggaagcacatccgcatgcgagcgtctcccatcttccactgacgcctgctgtggctggagccactcctgctgttcagtcaaagtgttagaccaacaacatttccaatgaaacagaaaataaaaacatacaactagctactgagcacagaagaaatagaccagacctcttcgtgacctttatcaggatcaggcaagtcgggggttacaatcggtggtattgcatctggatcaggcttctggaacacaaatgctgaatacaagcctgcgaaaacca

SEQ ID NO: 8557 - DNA, 354 bp, Zea mays
tgtctgtttccattttcagaatgtgaattgttcaatgcttcttcatcactcggagcactcgacagattctccttgttgtcattggaattgtcagctcgtgatgtatccacctcgattctcaattcctgcagcaccaccttcctctcctgatcggaggcagcagtttctgcaagtgagttctcgtctgcatcagtgctgctgcaaccgtttcgattctccccatcaggttcggcatgggtacacttcagtgagcgtcctaagattttcttcttggcattcgtcttggattcttgcccccgcttctcgctcttggccaccgtggtctcttcccctttcttgacagtcttcggattc

SEQ ID NO: 8558 - DNA, 317 bp, Zea mays
tgcaaaatgccagggaccatataagtcaggtaataactatcaggaaagtgaagctataagtttctagcttcacactatatagctgaccagtgcattttgcttgtttagttcactagcatattcatccattgaggtggttcttttttcccttttccttttgaggagctgactgtttgtccgagaaagtgtttattaggatcgttttgcactagaaggttcaaataatgtttggttaaaaatgacatctgttataggatagaggctataaatataatatagaatatacccgttctttagtacaatgtggccgcatttat

SEQ ID NO: 8559 - DNA, 360 bp, Zea mays
tgccaataaacatgccactagattatccaatatcaatggaccaaactaaactcttgcaaaaggtggataacatgcactggttaacaccaattcaccccatagccagcaacagagctagtttacagtaaagagaaattgacattattcttctataaatgaaccttatttatattcatgtgtgcttgatttgtttttaacatacactatggaatatgcacgtccttaaaagcatgcatgtgtgcctataacccaataaacatgacagcattaaagaaattattcatatccgaattacattgaatcctaactgtgaaaatctggaaatggagatgtgaaggaaagagcaaaaggcacacctca

SEQ ID NO: 8560 - DNA, 394 bp, Zea mays
tgcaactactgaaattgaaggattgcgggacaagaagtctgcattggaagaatcgtgcaaacaccttcattccaaggttaatggccatcagtctgagagagccatgtttgttgcacggattgagggcatttctcataccatggagaagctatcagagaagaatgtcttcttggaaaaattgttatctgataacaataccgagctggagttgcttagaaggaagctgaaagattcagaggaatctactcatgcattccgcaaccaaaattctgtacttcgatctgaaaaaagaactcttatgcgtgaggtatgatgcttgaaatctcttgctttctgtttattttcatcctaattagaaaactatgtaaattgatccctggatacttatattatt

SEQ ID NO: 8561 - DNA, 305 bp, Zea mays
tgagacgttagctccgggtcgcagtgcgtcgctgccgccgagtgctggtgcaagcgacatcaaggtcagactcagttcggcagcacaaactctacaccggcagatatcatgagccatgacaccaagagtgctgattcggtgctcctcctcaccttatgctcgaccttgcaatcgaccagtctgtcatcgcatttctggagaacaagcctcgagaagctcgtcacgatcgtctcccttacttggtcgtccatcgcgcggatgtccaccgtgaagtttacctgtcgtgggcacagctccaaggttca

SEQ ID NO: 8562 - DNA, 361 bp, Zea mays
tgcagttgttgtcttggagtactgattccactggaagccttgattgttgtaggaatcataagtattatcttgctggtaccccccatgccctgtcccagggatgctagaagtcctgcttgttgagccatatgaatgcttggttgaattgtggttctgctgtggctgctgcttggttgaccaggagaatgatgaactgcttccgttgcatgggaacccagtctccactgccaagaatgcattatggcaatttgggcacaacaggttatgattaagataaatccttaagtactcatactgcatccggcagcggttgcaagatgtccaaaatgtatcaaccccaacaggatgagtggtagtctca

SEQ ID NO: 8563 - DNA, 400 bp, Zea mays
tgaacttgcctccgggcagttgagctagggttttctctcctaaactcactagtcaagaccggttgaactagtcctgaggggcagttcagctggtctctgacccctctgacctctgatctgcagtctgccagtcagactggcaaacaggtcgccaggagctgtcaggggcggttcaaccgccccccctgggcggttcaactggtgttgttcaactttgacccgtctgcggtcagtctgcgcgtcagtctgccagtcagactggcagacaggttgccaggcctgccaggggcggttcaaccgccctagggggcggttcaaccggtctcaggcagaaaaatctgcccaaacggctagttttgagctccacctatatatactcactcctacctctcaccccaca

SEQ ID NO: 8564 - DNA, 396 bp, Zea mays
tgccatatgggcgcgcgacgcatcctcaacacgacctgatgtgctgactggaggctggaggctggagagcaggaagaatcatataatagtgtagtgcaggatctcgactcgacgcgcgtagcaggccggtaggtaggcaggcaggcatgtcatccaggaaaggcagaggcagatcggtcagtaaagccctgtgccgtgactgtcatccagcctgaaaggaaagcttcaatccaacggtgaacagcgccggtgggaagcgtgtgctggccttgtgggcttcggtttcggcgaacaagtaacgcttgcactgatgaaaccgataccgccggccgccgctagtcctgtgcacacatctggctttggtcaaacgattcacgatgatgattcgatgaagga

SEQ ID NO: 8565 - DNA, 357 bp, Zea mays
tgccacacatgatagttgcctagggactactcggggtagtttgtcttcctgggagtcgagtaattcgcggatcctctaaccatgtcgatcctccaacctcacaccagtcaccacacaacggatcaccagcccacaattcctactctctccactatcatcatcacggtggctggatcaaggtggaggtgcgtgccttggcgacattatctgacctcgaggcatttgaattctcacgagtgcttaaactagatttgatgctaattattggcttatagcaggaacactagaacacacacaagcattcacagatgagcacacagtggttttggttagaactaataaagataatttttctca

SEQ ID NO: 8566 - DNA, 406 bp, Zea mays
agctcggtacccctgaactgaaatgaacctgaaaaatgaacacatactaaaaatgaacacagactgaacacattccgtgaacacagactgttacattgaactgaactggtttcactgaactggttcacattacacaaacacaatagtttcaattacaatagttcgaattacacattacacagaaacacattacacctaagtcgtagtattaggtggggacagattacaaacatcccttagatatttttcttcggagttagctttttcatacaagctctccttactttcctaggtggggatagattacaaccaagctgctcattgcaggattgaacagccgcaaccatttggtcagaggaagaaggcattgtagtaagttgctgtgatgaacatgcagtggttccca

SEQ ID NO: 8567 - DNA, 362 bp, Zea mays
tggacctcgcaacgcgtggggccctattcgacgtagagtcgtagacgacagcgcgtacggcatgatagtgataggtcaacctgtacatgcatgctcctctcctcacatgtcccatactggcatatgccatgcggcagcaatcaagcaagctgcatcgtccagacgtcgactcgcgcgtcgtcggagctccgatccggcggtctatctggcctgagatgccggccggcggatcggatggagcatgggacagcggcgccgcgcgcgccaggaggacgcgaggcttgacggcgtccgccctgcgacctggagcatgggcgcaggaggacgaggcgtcgaggccgtgtgtggctggcgtgggaagc

SEQ ID NO: 8568 - DNA, 469 bp, Zea mays
tgacacccaccgccttctgttcagcgcagcgccggggatcggagaacggccggtgggtgcggtgtcgccgtgctgcggctgaggtgaggaccgcgaccacatacctcgccggcggggtcggggtcggggtcggggtcagagggcgtgggtgggttacgcggtccctttctttccgatcaggtccgcgcgcgctgccaatgcgatccgatcctgtggacgtctaggctagctcccacggattcccacgcccgcccgcgcgcgctgtcggtggcgtggcgtcccgggggccggggccttggcctttgcacttcacggggactctggatgcgaccaaagactggcaggtggggccccgtacgcgacaccgaatccaagagcggcatcgagcacttgggagttgggatgctaacccatgggctccaacgacgtacccggccgccggagtagtaatgattgaatggataatcca

SEQ ID NO: 8569 - DNA, 444 bp, Zea mays
tgctacgagttacagctcggtaccctttggattcttgatcgcaagttgaatgaatttctggcactaaatcaaggaacctgaacggtattgcagtatgctcaggccttcaatgacctgtgccagtatgcaggttatcatgctgattctgatgagaagaagagagaccgcttccgcaggggtctcaacaccaagctgcgtgagcgtctcaacactgttcgggctgatagcttcaatgagttggtcaacctggccatctcccaggaggactgtattgtagctcaccgggcagagaagaagagaaaggcaccaaaggcagcaccatccgctcagtcccagaggttcaggattgtttcccacaatcagagcaggggatttcagcagcaggcaggcagatgggtgatcaggccacctcagcagcagcagccagcacccactcgttttcca

SEQ ID NO: 8570 - DNA, 418 bp, Zea mays
tgctgctcacacttcaaagggctggtcaagaacaagactgactgaccgcttgtttctgcactacctgcagggctgcgacgcgtccgtgctcatcgactccaccaagggcaacaccgcggagaaggacgccgggcccaacctcagcctgcggggcttcgaggtcgtcgatcgcatcaaggcgcgcgtcgagcaggcctgcttcggcgtcgtctcctgcgcggacatactcgcgttcgcggccagggacagcgtcgcactcgtaagtcactgcttctttagtgtcagtggacgcctgccttttgattttaacccgacatgattagtttacatggatttggaatccaatgctggactggactagactgaaaagcatatgtgtctgttcgacctttttttgacgcacatgatgccgcgtgca

SEQ ID NO: 8571 - DNA, 335 bp, Zea mays
tgttctaccccacaaagttccccatcgtaaccgtaaaatacattctttgctcctgtctcgcaattcaatggccttccttcaatgcttacctattaataatagaagaataacaagcgtagattatttagcatgaaaatgcaccagaccaaaaaagtgaagttttgccatcaatgaggacagtgagggtgatatatacctctcttatatttctcttaacataatcagcgtaactgggaactttccagcgtcgtggaggtttgcttaaacgcagaactctcctttgcagcgcgaactttgaaccagcatggacccatggatcagttgcccctccttca

SEQ ID NO: 8572 - DNA, 375 bp, Zea mays
tgctgcaccctggggatcctagtggagccaccaacaaggacaacatcatggacgctgctcttgtccatcttggcatccctcaggcacttctcaacaggctccatgcacttcctgaacaggtccatgttgagctcctcaaacctggcacgggtgatggtggagtagaagtcaatgccctcgtacagcgagtcaatctcaatggtggtctgggcagtggaagacagagttctcttggccctctcacaagaggtcctcagcctccggagagccctcgggttgccagtgatatccttcttattcttcctcttgaactcctggacaaagtggttaaccatcctgttgtcaaagtcctcaccaccaagatgggtgtcgcca

SEQ ID NO: 8573 - DNA, 348 bp, Zea mays
tgataatctgaaatacggccagctaaagcagtagcttcagcctcaagtgaactatgcccggtaggtgtaggtggatgtgcaacatcacctagcatttgttcgatgacaggtatgaaaggcgagcctctctccccagttggcaatgaatgcctattggccaattccatagcaggctctgggtccttttcgcttgaatttggaaggttttctgccagtagaacactgttgtcccaccaatcttgcacaaagctgttagtgctaagatcaagcatcatagtttccagcagactgttgtttccactacagtccttcatgttgttttctagagtttcagcagtagcttcttca

SEQ ID NO: 8574 - DNA, 405 bp, Zea mays
tgattttagcctagacttcactcttactgcttggtgttagccatcagacatgatccattgatcctatatgtaacaatctgtccatccatctatttccaacatttgtggatactgcatctacttctaatcgagctgcagtaatggtgtatgatttggcccaagaaatctgttatctaattggcaatgatgctgcataactttatgccacaactaacttctactacttgatgcataggagcgtatgtcttataaaaagaaatcgaaacattatgttctaggacccaacaaaatattgcatgaattccacaaaaccacattatactgggaaaaggtcttgcaagcctttcctgctcccgtagttaatattgaggcagttgcatacttgtgatattgtccaggagctca

SEQ ID NO: 8575 - DNA, 812 bp, Zea mays
ttgctagtacccctgctgggcacgctcggcggaggcgatgggccggacgcggccgacagcctgcacgctctcgccgagcaaggtggtgcgcggttcgtgatggccgacgggtccgacgcgggcggcccgcggatcgccttcacggacgccgtcttcgccgacgcgtcgctgaagctgaggccggccttcgaggaggtcgccgtggggaagtacggcgccgagatctacgtactccgtcgagttccagaaaaaggtccatctgatcaccacgcttcgctcgcaaacatctggtaacaaattaaagctgtatacataggcaatgagtacccgctacccgaaacccggtgggtttttgctctattagggtatgggtttgggttaatttctttacccatgggtttgttaatgggttcaaatagaaacccaactgccgttcctattgcttgtgcaaatcagcgccttcagtgcctgtttcacgcccgcaatggctttatagtcgtatcgtatgcagtactgttactgtactaccaggccggtttgctgcctcggctcagctcagatattttcgttctgggcctctcgggcaggtatcgtcgtgcatttgtcttgcacggatgcaattttccacgcaggacagtcggagtcgggacactgtctctgcttgcagattttgcaagaccgaccaacgcagataatgtttagctttggtgagcaaaggatcaaagcgctgctgacatgaaatatgattcccaatccgtagtgtaactagtcagaacaccgctagacattgtccatgccaagatccctattca

SEQ ID NO: 8576 - DNA, 387 bp, Zea mays
tgccctcggcgagcagcagcacggagtcgaacatgcggtagacgcgggaggacggctggtgcacggacaggacgacggagcgccccttccgcgccagcgccgacagcgtcgccacgaggcgcgccgcggcggtggagtccagccccgacgtgggctcgtcgaggaccagcaggctcgggttcaccagcagctcgtgcccgatgctgacgcgcttgcgctcgcccccggacacgccgcgcacgaaggcgttcccgacgatggtgtcggcgcacgcgcccaggcccagctcgccgatcacggcctcggccgccgcggccttggcggcggcgggcgccgaccgcggcagccgcagcatggcgcagaaggccagcgtctcgcgcaccgtca

SEQ ID NO: 8577 - DNA, 411 bp, Zea mays
tgaaggtcttgctggtgtcgcggttcgtggcctcgatgagctccacgttggcacggtatatatggaacctccggagcttctcctcggccgtcgggtatgaccggccatgagctgccatccaggcatggaagcggaaccactccgtcgacatcagcagctcttggtcacttccatcagcgtagtcagcatgggcgtagcttcgaccagaggaagccaagacgaagccgcatgcgagcacagtgatcattagaagaagcgctacggataaacgagacgacgacaaaggagagggagggccattcatgtttgcaggctgcttgattagctagcagcacggttagtgggccttaaatagtcaacctaataataaagctctgacagaacgggaccatactagtccgtctagtagca

SEQ ID NO: 8578 - DNA, 357 bp, Zea mays
actaagaatatatccagccctttttaactacagcaacaaggactgcttgactgcttatagatttgccaaaatgaaattgcacctacaaattttgacatgccaacaaatgcatcgttaccactactgctggtactgctatatagtctcaagaagaaaaaaaaacactatcctcagctagctactactgctatatagtctcaagaaaaaacactgtcctcggctactttctgaattaggtaggtctggcaaaagccatttgcagagctataatccactgttcgagaactagttactaatggagggttatgagaataattgtaaaaactaagaatacattatattggtagaaaaaaaaac

SEQ ID NO: 8579 - DNA, 373 bp, Zea mays
tgctgcttgacgtgccaccaccactccgaccgatcatcccgccgacctaacacccgcactcgcgccacgcgcgtcgttcctccatgcaatcacgcctgccccggcccctagccgatcgagatcacctcggcaccacacaccgactgcagtctgcagtgcgttgcctttcgagacatgtaggatgatgtagagctcgtcgacgtcgtagcaccacactggctggcacgcaccttgcgtgatcaccaccgcatcatacgtgtacatacatgcatgctccgacgtgcgtccaagaactagctataggttccaaaagggaaatatgtcgctgttgttattatcttcgcgtcgccatgcaaatgcgtgcgtagaccgg

SEQ ID NO: 8580 - DNA, 393 bp, Zea mays
tggtggcaatggcggcggcggcggaggtcgtgctgctggacttctgggtgagccccttcgggcagcgctgccggatcgcgctggcggagaagggcgtggcctacgagtaccgcgagcaggacctcctgaacaagggcgagctgctcctccgctccaaccccatccacaagaagatccccgtcctgctccacgccggcaggcccgtctgcgagtcgctcgtcatcctccagtacatcgacgaggcctggccggacgtcgcgccgctcctccccaaggacgacccctacgcccgcgcgcaggcgcgtttctgggccgattacatcgacaagaaggtgactgcttcctgcttgtcggcttctatacgcatgcatgcatgtctcttgtctcctttca

SEQ ID NO: 8581 - DNA, 505 bp, Zea mays
aggacccccctaagccttcgccggcaatttccagggcacgtacgtgcgccccgggaattcctgggacctccggagctgcctttttactgttgggagagtctcttcggcactacatccggcgattctcgaagcagcacactgagctgcccaacatcaccgactcagatgtcatcggcgcgttccttgccggcactacttgtcgtgacctggtgagcaagttgggtcgcaaaacccccaccagggcgagcgagctgatggacatcgccaccaagttcgcctccggccaggaggcggtcgaggctatcttccgaaaggacaagcagccccagggccgcccgtcggaagaagctcccgagacgtctgctccgcgcggcgccaagaagaaaggcaagaagaagtcgcaatcgaaacacgacgccgcagacgcggaccttgtcgccgccgccgagtataagaaccctcggaagccccccggaggtgcaaacctcttcgacaagatgctcaa

SEQ ID NO: 8582 - DNA, 405 bp, Zea mays
tggaaatcctgagcattccatacagtagtcaaattcacatgcatttcctcagttcatccactgaattctgtatcatcacctttttaacgctttctgcgctagaaagaaccaagtggacaggcgtcaactccatggccgatcgatgagccaatatataaatcgcttctagcagtgcttcttttctcgcatcgcatccactggagccaaataaagccagcttgatcggtgacgatttattagctagccgtcgtctgatagctcaattggttagctgattaacgtggtgcagaagaagaagttgagctagctagcgatggtggtttcaatattgactcacccgttcatggctgcggcggcgtgcgtcgccgtcgcgttggctctgttggccacgaccagcaacgcgca

SEQ ID NO: 8583 - DNA, 411 bp, Zea mays
ctcaattaatgataggctcagtagttttctcagtgtcttcaagatcaatgtttctgtttttgcccgtatgtgagcattgaactgatcagttgagaaattggaattactccctcatgcattgtgccattcaccttttgtggagtgtttatggagctgatgttggactctgaatgttttgggctggctcaaacctttgttatcttctgggaaagttattatgttgagctcctgtttttattattattattttttgctacttgcttaaaccgagtaaatacatagtattacatacatttgagttactcggtttgatcatcccttttttaatacaggagtgctgtatctgcctatgcccgtatgaagatggcgtagaactacgtgagcttccttgcaaccaccattttcactgca

SEQ ID NO: 8584 - DNA, 390 bp, Zea mays
tgtattccagcctgtagtactgtaatactgttgttgaatggctccctgcatgtagaatgaagccaaccataccttctctggctcaagggtgcatccaatgcaacgcggaagaactgctcgtagcggtggagccatgataacgggtctttggagccgtcgtacttggggaaacacagcttgtgagtggcggtgttgatgaaggcgctggtcctaccatcggccgtagaggatttcggctggaacacgggctggtgctgctcacatggcttcttgtagctgcccaccattgcttcggctggacattgttgacagtgatgtggagacaaccctgatcagccttgagggagacctcagtggacaggccggtcaccttatcctccatgtccatca

SEQ ID NO: 8585 - DNA, 352 bp, Zea mays
tggagaattaatggggttttgctctcttggttccctttgtttctgcaaaattgaattatgtatccaatggtgaacatttgatatatggggctctttggagcatggcactctggttgttctcatgagaaacttgtgtctgtacaatacctggctttgtgcacgctgatagtgtctgcagtttatatgttgctgaaatgcctatccagttatgtttctgaaatttaattcggtgttgaatgggttttatgggcttgactcaattaagtccctgtttgctgtttggtatggctcttgggggcgccggctcctcctcccgttcactgtaacgcaatttttgctactatagcaagca

SEQ ID NO: 8586 - DNA, 552 bp, Zea mays
tgctgtagagtgtttccatgtggtgcccgtaccaatgatcgaccgggcttggcagatttatataagtatactagtggctgaacagtatgcagtgttgggctagtagcgtgaatgatttggtaccatgttgataaatttggccattattgcgatagttttctttactatgtgatgattaatttgtataatgagattacataccttgcatgtgtactgcataagctatatgcagttttatcattttatcaacactacatgcacattccttaaaagtggaacatcacatctgaacgttcttatagtccttgacacaacgtgctcccacttaaaccatgttcgctatgcagctggtatcatcacgggaaacgatggacagataaattcaatcatgtgatcggtgtagtgcatacaaattatttggagtacatcaagagggagaagaatggtgctattcaggcctttttcgttaagcacattaataacctggtcgccagagcttattgccataaggtactcagcgaattatattattcctctgatgtttgagccatc

SEQ ID NO: 8587 - DNA, 820 bp, Zea mays
gaccccggattgaattttaaaggagctaaaatgcaaatttctaggaattaaacaagattctgtaattatatcaacactaattatcattttctatattaattcctctgattattaactttctgtgctgcgctcataaataccagggagtccaggggctggtttacaagaatccagggtctgtatgtaattaatttgcacagggtgtagactcgggttgatttgctcgattcctagggtctattacgcaaaatgcctaggccgaaggggtatcattcggccaggatcgttcgatcagaaagcaaccgccaggatttgatcccccaataactgaaccggtgtctaattccacccgtgggaatagacatccacggcccagatcacttctgtgaaacagcaacacatttccctcgccacaaccattcacacctgaaaggggggccggccgcgtgggggtgggatgaggatgactcatccggaaagctgatctgcttagaaaactgtgaaggggttagtatagttgccactccagagtccaacatggagctgtgcttccactcagacttttttttttcccccaggtgatggtctacaggtatggacagtggcgagcagggagggctgtgcctccccctcctgtgccctgaccctgacgtctctttccgataatacctttccatcgtgctgcttaatagtccgtttaaatagcgtaagatccacgagctgcatgcacatggccggtcggttcccctttcttttccgcgcttttgttgatctgttaaatgttgtcagaaaggaggagggacgcatcggtcgatcccga

SEQ ID NO: 8588 - DNA, 515 bp, Zea mays
tgcagcagtagcgggtgggagcagtcggcaccgttcggctgcttcggcctcctcgccgccgacgtccatgacctcttcccgctctgtacgtgatgatgacctttctttgcccggattaattacctggtcgtcgcttatttatgccctttgcactcgcagtcgcagccatggagccggcgccgcccgccccgccgccgccgtcggcgcacggcgtggccgtcgcgatccccggggagctggacgaccttctcctggtgcgtgcgtgcgtcacatcacgacgctccggaagaggagaccaaacagaccacccaacctcttagcattagcactaacagtaacagtagcagccagagctgaattcttaccactgagccaccgctagctcatcaaagctctctcgttgttgtcgttgggtgtccccttgcagaacttctgggacgcgggctgccacgacggcgacgtgggcgagccgccgctcaaggcgcagcagcaggaggaggccgccttcaattcca

SEQ ID NO: 8589 - DNA, 914 bp, Zea mays
tggaaaaaaagaacaagaacctacaacacaagtgtcaagtcggcactgcgaagggtgcatgcatgcatgcatggacgggtcgggcagaggcctggccaccaccaccaccactggcatgcatacgatacgacgcgtacctttccgtgcctctctgtgaagcgactctgacggcgagaagcgatcgaacaagcaagcaggcaagcagcaggtccatggctacatccgcctgcgttctttctttctgttggaacaaggggcgatgtaggagatctgcccttcccatgctttttcctccaggttcggaatcgaaaggccctcgctttcttttagtttgccctactagtagttttagactagaaaaaacaatgggtgtccatccagaatccaaggcccccagtttcggaagcagaagtgattcaagctcttgttccagcgctatctgaaaaagaattttctaaggaggaccaccagactttttgcttgaaccttgaaaggtaatattcataaataggatccttgcagtttagctttgtggacttcactagttcgcgcctttgacacatttacactgtgcatgtttatgtatgtatactgttcattctagttatcgcaaaagcaattggggcacattttcatcttatctttagctagttgttgtttctttatcacatttatgccatggatgtttatgtatacttttgttccttttgctttcacctgataactatattttttacatatttcaggctactgattctatggttacttgataataagggtgttttccaaattgttgtggacttcatttgttctaaaaagcatggtgaagatattctcagcccagataaaacaatatccgtatcaagggttgcacaactacttgcatctgttccagataaagcaagattgggagc

SEQ ID NO: 8590 - DNA, 476 bp, Zea mays
tgtaaaattgttgaattcctgcctgagactgggagcatgaagatctacagcagcattagctcaacagggctgcaacgggttgcttgtgctctgccatggaataccacagtgacaacactggacatgtcaagtgtcccactaaagtccaaatggaccaaagagcttagaggagtccttgaacggaacaggagcctgaaaactgtgaagctcagcaagtgttcccttggggacaaagcagtggtgtatatagctgcagggctctttaagaacagctatttagagaacttgactttggatggaaatagatttggtggagtaggggtggagcatttgctatgccctcttagcaccttttctccacttcagagacaagccaataccacattgaaggttttgagttttggaggagagcaagcgaatataagcaagtttggtgtacctgctatcttgcagatgttggagacaaaccagagcct

SEQ ID NO: 8591 - DNA, 568 bp, Zea mays
tgcttcgccgcttggagcgcgacccaccattgctggaacctgagctcgacctttcgatcggtgtggaggcgccactttgggaatttgagttgcagttggagttgggagtactaaaagcttggcgccgcataagctcctgaacaataggtgagcgggccaactcctcaacggtaaggtggcgccccgtgccgacctcgcggagaccgaattcttccttcaccacgtactctctgccgtcgtcaaggttcctgatcaagcacctggggtcctcgtcggcaggatcgggcccgtcggacaaggatgaccgcagacggacgcccccgagtggtggcttcccggcggagcccagggcggccccgcctgatctggaccgagagacgggagaggctgggggcgggcccgcggcttctccggaggcggaccgggcaatctcaaatccggcgagggaaggatccccggtgagccccatgagatggagcagccggcgccgccgctcatggacgggcgccggctgggaggtccacaggtcgagggccgctgcggctggcgcatcgcaggggtaccgagc

SEQ ID NO: 8592 - DNA, 504 bp, Zea mays
tgctcttctgtaaccatcttatcttatgcttgggacatgttcttcttgtctgcaggaaggtgtaggcatcggtgaagacgggcaagaggagactctgctaatgctggagccagagagctccttcggcgagatctcaatcctctgcaacatcccgcagccctacacggtccgcgtctgcgagctctgccggctcctgcgtctcgacaagcaatccttcaccaatatcctggagatctacttcgtcgacgggaggaggatcctgagcaatctctccgaggtacatacatacatagcctcagacggccccattgaatcgaatcctctgcagtggagtggatgatgtcccctgacgtgacgtgacgcgttgatttgtgactggctgggctgggtgcagagcgagtatggcggacgggtgaagcagttggaatcggacatcacgttccacatcgggaagcaggaggcggagctcacactgcgggtcaatagcgccgccttctatggcga

SEQ ID NO: 8593 - DNA, 421 bp, Zea mays
tgttggatctgaaacttctgatgcaaaccatgatttgaagagttcaaatggtaaaagtaaacatatgccttctgaagcagtatgtaccagcgcagagattcctggaggtcataagtccaacagcacagttgaaatttctcaaaacgttcagtctgttgacagtagtaagatgggatcaagtatcaaacatgcaaatgcaaattttgttgaagatggttcttccaccgtggacttaaatgaggcattgccatgtaagtctcagtcttctccatcaaacataaatggtcatagcagttttgtaaacaaagaattctgcaatcattccaaggaacaccaaagagccaaggatgccagtgttgttgatgattgtcttcagacaagcagtaccagagagcttgaagacagtagcattccccaagca

SEQ ID NO: 8594 - DNA, 465 bp, Zea mays
tgcagttgggtgacatagtaatttctgttgacacagctcgacggcaagcagaagaaaggggacacacacttgttgatgagataagaatcctcatggttggtttgttcctctctttatttcctaataatgtttaactgcaacttttccagttgcataaatggatcaatagtcgtgtggatgttgtcagatttatcaatatagtcattttcatctttgctgcactttgtacctccataatacgcaaataggatgttcagttcactctgcactctgaaccttcacaataggagcatacaacattaagaaaatttgtatcaaaggcataaaaaccatagagcactgttttaatggagcagtatctgatatttaaaagctgcctgcaaaaatagagactaaaggtcatggcgagatgcacaatgcactagtgctcaactgcttgtttccatcagccattgtgtatcaaca

SEQ ID NO: 8595 - DNA, 555 bp, Zea mays
tgatagatatgaaggtccggcaaaaaagttgccctgggttgcaaataaggctgctgctgcaccatcggatgaatcggccctaaaccatcaggtactgtgggttgagccatgctaccatcagagcttcttgtactgctgaacagccagtcttgaccacccaaatctgaaccttcattctccatcaatagcggattccaggtaacaaacagatctctgaacttcttatttttcttctcagttttgtggattttcttccgatctgaacgggagagcttagcttccttcccttgatctgcttccacagtccttccagagaaacaaggctcttcttttggcaaagaggtgataggctcccgctgtttaggaacaggcaagtccttgggtttctgcaaaacaggaggatgtggagcttgtggcaggcaaacagcagatcccatttccttctgtgacaccttcgcctgaggatcaactctctgtgacaccatggaaggtggatgctgaattctctgttgcgtcttaacaggtggaggacaaaatcttcgggtcactctagca

SEQ ID NO: 8596 - DNA, 463 bp, Zea mays
tgccaaatatatattgaaccaagttgtgagtgacaacaaatgaaaagagttgcaccatgtgaccacattatagggtgaacattgctgccacagaagtgacagctaagacaccaacatatgacttttttgcaatatttaggagtaccacctaatacagaacataacagaacaggggcaatggagcaggcatgtgtaaagtctcaagcttctaatgaaaaatttaggtgatggccttttgcaaaagagggaagctcacgtcaaggatgtacctcggtatagtcataagcatctgaatttccacctcttgtgatgcctaattgctgtgtacccctactagagtagctatcagtagacacatggtcacgataggaatgatgaggcatatgatctacaccaggactgaaagcagagggaaattctctagtaggaaagcgtgtgggtgctgcatatctctcataagcaa

SEQ ID NO: 8597 - DNA, 495 bp, Zea mays
tgccttgccaggtcttccttcccttgcacttatatcggcttgtccctgtcactaatgagactaaccagagggctagtgcagcccattatcgataaagttgctgaccaattacatgggtggaaagctgaattattgtcaagggctgggagaaaggttcaagttcaatatgtgatgacaggaaaacttatttacctcgcaatggctgttgatttgcctccaggagctctcaaggctatagataaaattgggttgtagaccaattgagttgggagggattcatacggaaaggaagagaggttagttgtggtcactgtttaggggcgtggggaagggtttgtagaccaattgagttgggagggatgggtattttcagcctaaaagaattgggttgggcccttaaaatgagatggctgtggttggccaaaactgatccttctaagccatgggcattcctacctatacacctctctgaaaaggttagatatttcttttcaa

SEQ ID NO: 8598 - DNA, 492 bp, Zea mays
tgacagcacacaagcaacagccagaggcccaagctggccaacttgctccctagtctaccattcaaatcaaatactaccccccacccccaaaaaaaatgaggtttttttgcagtcgcgttaatattgacgcttgctcgaaagaactatcactaggtggaaaaaaaaaagatatgttaacagctactgcaattcaatccaattgaagactctgttttttttggtctaaaaggttcccaaatgaattcggctttgtttatgtgtctgtatacctcaagtgccaaactttaaaaaaaaacaaaaacaaaaccaggtaccaaatcccgtgtgcaactcaccacctcagtgccaaaaccagtcacagtccaagaagacttggaagaaggaaagaaagaaaaaaaaaactatccgttccagtacccgtacgtacgtcctcagcataaaaacgtcagagagcataaaactatatatagcacagaaccccgcccaggttca

SEQ ID NO: 8599 - DNA, 464 bp, Zea mays
gtcatgatgaacagttgcaatgtctccaccttccacttaagattaagaacaattccaacctaattaactcccttagctttagaacagtgggaactgagccggtgagccctcgagttcctttcccagccactgattccaatgtccactgaccaatcaagacaattccccaatcctaaactcctatctcccattcccttataacaatttcctacgatcgaacacacttgtaaggtcctgatctttatgtgatatgttacaaaacaatcatgcagtaaaaaaaatgaaaatcatgggtacataaaacaatcacccaaccacaaaatccatattaagaaatgagttactgagaatagcaagctagcaaccaaatgatgctgataaaggcacataatgcttgatcacagggatacctgccaatgttaggagcccatgctacagcacacactttatctcctgtatcctca

SEQ ID NO: 8600 - DNA, 437 bp, Zea mays
tgacgacgcctctggcttcatctccgtagggccaaatccgggagcgccctcgccgcgggagcgggagcttacgatgccgttgggctccatctttatccggccgacgtcttccgcctgctgcgccattagccctaggctctccatgtagaacgatctatccagctcgttgccgtcgtccaggccctggccaagaagggcttccatgtctgcggcgaactctctgagctcggcgtccgtggggccgaagccggcaaagctgtccgggagctgctgcacgggcgattccgcgaccacgaccggtggtgcctttgtgttgttctccacggcgccgtcgacgtcatccctgcagcaggatgaggccgtcgggtcatcgaccggaggcggtggcgagcagagctcggccagggcgcggtcaaaggtcggcacgcagtacagca

SEQ ID NO: 8601 - DNA, 987 bp, Zea mays
ggagcaaataccaccacagagaaagcaataaaccatgaataccaacttttcaaaaatctaaaacttgcttagaaactagtattggaatcgtcaggactagaacgctagacctaggacgaaaggccttaggaatagtggggaaaataggtggctaaataagtaggccctatgggccagtccttagatttttaaaaggatgccctaaaaaggcaccattctgattcggagaggagacgctcctttcagcatgcatgcattataaaaactaaaagagattagaaattaaagaagtaaaaaaattgagctaacccacttcctttcaaaccatccaggctcacatattttttcttccttccaccatattctttacgtctgatcctcttccacagatgacttcacccacccccgccaatggaggagacactcgtttcagttctgacttcctttctcacgatggctttccttccatcttatgggaagtgcttaactctgccggttaccctacgccccctttgtacacggtgcagctgcgaggtcggcgcttcgatgctgtagttggacaccatggcgtcctccgcctgctggttggggatcagcctgatcttggcgtaccgcgagatgagcgagtagagcgcgaacgtgccgccttgggggagagagagagagagagagagagagagagagagagagagagagagagagagagagagaaaagcagcagatcgatcagtgctcgtgtcgttgatcagtaaataaatacaaagaaacaaagaaatatactctgctcaccgtctccgttgtcgttggcgtagagcacgacgaagacgtacttgagcatggggatgatgatgagggtgtagatgatgagcgacagcacgcccagcaggtcgtcgttgtacttgatgccgtcggggaaggtgctggagtagacgtagagcggcgacgtcccgatgtcgccgtagatgatgcccacgctctggaaggcca

SEQ ID NO: 8602 - DNA, 507 bp, Zea mays
ggagcaaattccaccacagagaaaaacaataaaccatgaataccaattttcaaaaatctaaatcttgcctagaaactgctatggatcgtcaggactagatcgctagacctaggacgaaaggccttaggcatagagggagaaataggtggctaattaactaggccccgtgggccagtacttatatttttatggatgccctaaaaagcaccctattttcttttgagaggcaacgtttcttccagcatgcatgcattataaaaacacaaagaggaattaaaatttggagctaacccactttctttaaaaaccacccaggctcactttttcatttttcttccaccataatctttacccttgattcccttccgcagatgaattcacccacccccgccagtggaggagactctcgtttcagttctgacttcctttctcgcgatggttttccatccatcttgtgggaagtgcttaactccgccggttaccctacgccccgttgtacacgatgca

SEQ ID NO: 8603 - DNA, 494 bp, Zea mays
tgccgtcttggtatcaccgccaccaattttccctaggacagacaaagcagcttctttatttgttagcattccatctgattcgtgcatgtcatcttgttgcatcgattcaaatacttcatcctttatccccaatgttgaaagaagagagataatttcacggttcacataacatggctgagacttactccaatttgtaatgttcagcatagtgctcttcgattcaaacttcttcatactaggtcgcagagaaagattgaaaaaggatgtagggtcaatagtgatgactcctttatagcccccataccttatttgaaaagcagaaggaggatgagctgggtctaagccaattaatttggcgacttgtctggcaaatctagtagaaatcttcccgataccatctgaaaatatgtatttagtgccatcagttgtgacttcaatatctggaattacttctacatcatatgatgagacttcaaatgtttgcctggatgagc

SEQ ID NO: 8604 - DNA, 557 bp, Zea mays
tgatcgattatatcttctcaatattaattatagtatattaatttgatatatggtcgtttcctcttgtctgctgccccagacatggaaggttagggcgatctaccaattcgacatggccgtgtacaccaagatcttcctcaagttccccaggaagttctggcctgaagggaaaggaagggagttcttcctctacgccagcagcaggagaggttactacggagtgtggcaggtatactaattagctagctagctagcttgtagctgctgatcgatgggcagattatgatcaaataacaccgaacactttgcaacaacaacaacatgcgatctacaggagttcgagaagcagtaccctgacgccaatgtcctcctggtcaccgtgaccgacgaggagtcgaggcgcatcgagcagcagtcggacgagcagaccaaggcggagatcatgcaggtgctgcggaagatgttccccggcaaggacgtcccggacgccaccgacatccttgtcccgaggtggtggtccgacaggttctacaagggcaccttctcgaactggccag

SEQ ID NO: 8605 - DNA, 638 bp, Zea mays
gagctcccgagcggctagccgaggcgtctgctcgggccaggacccttgcggggggcctggccgtggccgtcgggtctgcccagtgtgcccaagccgtggcctcgcagcagcgtgcccgggccgaaggtatgttttgcccactttgtgactttgtttttgtctctattcttctcctcgtgtctgaaggacactgtccggctgtctgcagggttcgagacggctcttaacgagtccatcaagaactgcaaggcgcttgcccaggcagctgagcagaaggaggccgaccgcatggccatgtccgaggctatctcagctttttgccaggcctttggcctcgacgacgtcccctcgggtagctccctctagagtcacctgcgggccttaggcggccatgtgcgcagcagactccgcggggcgctgcaccacgacgttaggcgggccttcgccgtgctcgcttcccactacgacgtggatctggagcgggtcagcgaggggtactgcttacccgacgaagaggaggctaccttagccgaggtctagaggcttgacgtggctatcgagggcccaagcgcagcattggcttcctcctttgaggtggaggtccttccgcccgtgtcgccgtctaaggccgtgccagg

SEQ ID NO: 8606 - DNA, 485 bp, Zea mays
tggttggcctgcaccacggccatggagaactccccagtgacgagctgcccggcgtccttgtaccagaggagaccgtcctgccggccagcggcgtcggagccctttccccggtgcccggcacccgatcgcgggccccagcaggagctaaagtagtccatcaccgcggccagcatccctcatctcatcgccctcccctccacgcggtttcttgatggcatcctcgagggacccagctcgctcttatagcctttctctctccgccgccctttcagcctcttccttcctcccctgcttaacggaaacaacggatgcaaccaaatcaaagcgagctaaaaaaaaagtcaataatttgtgtgtgcgggtgagctggtggatcgtatcgtatgctgggatccaagaaaacttgcggccaactcatcatctcgtatgcatcaagcgtcgtccagtgtaggcggcagaaacatgtcaagggacaagaggcgaca

SEQ ID NO: 8607 - DNA, 1473 bp, Zea mays
accccgagtatgcctctggcggaagttacaacattgactcggacatacatgtataaaaaggtcattctgcctctatgtcggtttaaaacgccgaagctccatgaaaagggaccttcggccatctcttagaaacgactttggccgaagctgcttcttcgtgtgagaccttcggcgtaccgaagcacgaccccaacagtagcccctttcgcggtgctagatcgttcttcgtaacgagcttggcccgtgaaaaaaaacctcttcagcttcgggaagccgaaggtccaaaaaacaccttccctgagctcgttgcggagaaacgatccgacttccgagcgcgtgccaagcccactttgtagagttactgtttggtctttgcggtccactgcacagcgggtatgagttactgcgcgcctggtctcggtgtagatgatgttgaggctgctgcccccatccatcaggaccttggtgagcctgacgttgccgacgatggggtcgacgacgagcgggtatttccccgggctcggcacatggtcggggtggtcggcctggtcgaaggtgatgggcttgtcggaccagtctaggtagactggcgccgccaccttcaccgagcagacctcccggcgctcttgcttgcgatgccgagccgaggcattcgccgcatgccctccatagatcatgaagcagtcgcggacctcggggaactctcctgcttggtgatcttcattcttgtcgtcgtcgcgggccctgccaccctccacgggtggcccagccctgtggaagtggcgccgaagcatgacgcactcctcgagggtgtgcttgacgggcccctgatgataggggcacggctccttgagcatcttgtcgaagaggttggcgcctccgggaggcttccgagggttcttgtactcaacggcggcgacaaggtccacgtcggcggcgtcgcgtttcgcttgcgacttcttcttgcccttcttcttggcgccgcgcggagtggacgcctcggggacgtcttccggctggcggccctggggctgcttgtccttccggaagatggcctcaaccgcctcctgaccagaggcgaacttggtggcgatgtccatcaactcgctcgccctggtgggagtcttgcgacccagtttgctcaccaggtcgtggcaagtggtgccggcgaggaacgcgccgatgatatccgagtcggtgatgttgggcagctcggtgcgctgcttcgaaaattgccggatatactcccgcagggattctcctggccgctggcggcagcttcgaagatcccaggagttcccaaggcgcacgtacgtgccctggaagtttccagcgaaggctttgaccagatcgtcccagttggagatctgcgtaggaggcagatgctccagccaggctcgggtggagttggagaggaacagggggatgttgcggatgatgaggttgtcatcgtccgttacacctagctggcag

SEQ ID NO: 8608 - DNA, 505 bp, Zea mays
tgcgcgctccataatgattacatcgccatcatcgtcctcatctatgaccaccacgttgcgaggcgcgggcttgtgcgcagggaacacccgtgttcgccgcgtcagcgtgggcccctgctgaggagtgaagctgaaccgtccccacgacatggctagtccgggggcccaagaccgagacgatcgctgctgcaggctggcggctatagcatgccaaaacccgcgacagactcagggttccacggcgatcctgcagggaaaacggcaagcttgtatattcaatcgaatgcggtggggaaatgcgtagtcaggaaccctaaatcgcaggaatgggcgtgaaacagcggcgaaaaagaggagacttaccgtggtagcgacgtcggcggttagattcggggagggattgaatttgggagacaagaccccaaatccgccgccgctttgtccttcccgttgaggaagaagagaacgacgaggaccaagatgaggtagccgccgccgtccagca

SEQ ID NO: 8609 - DNA, 479 bp, Zea mays
tggcaccacacgatcttgactaatttcagttgcagatgacttacttgccttcttaacatacttttgaagaggtttcactctaatttgactgtcttcctttccgttacaatcgctcttaccataaccgaaacgaaccttactgtttgaacacttcaaggtatctgaactattcggatgcagcttgcaacctagcacacttattgcaggtggcggctctggtagcagcagctctcctgctgtaaggttttcccagagccagaccttagtagctgcagcagcaagtacctgagatgatgcactgggaggtcgtactagcaggatatcatagcgtttcatcctaagtcggtgaaggagatcagagagatcttcatcgcctgatataagcaagtagctgcccggtggaggattgtcgaatgcccagaacaacatgtcgacaagcatcctcttctcactggtgtctttgcaccctgcaaatgtca

SEQ ID NO: 8610 - DNA, 477 bp, Zea mays
tggagtggtccaatagcacatcattacatgcggcccatggttcagtattaaagaaagcaacaacttgatgatcaaaatgctggtctgtggtgcaatctgatgaggtttcgtatcttctatgccttttgcataactgacggccacaatagaaagtcttagagttgggatgcggaaattctttggtagtggtgctagcaaatagcataagcacttgtttttttttttaattataaaatggagtaggtatgcttgctcaattatctagagactgaatatagatgattggttgaagacaaggttaactagatccattccattgtagacatcctagtttttgaaacattccaatacaagtccgagaaccattgaccatgatttcagctataacttgtttatctgttagtagagtttgttatttgcctgccacatgttattgttattgaggtaatgtttgtctgactgttgaccctgatttca

SEQ ID NO: 8611 - DNA, 517 bp, Zea mays
tgttgtaaactctaaaacgtctagctttagtctacttttatgagaatcgatttgataaaaaccatctaaaattaacgtgaatacaaaatcagtaaagtcgcgacagtataaatccatcactttctaaatttaaattatatagacttcttcatcttactctgcacataattctcatgatgctctaattcttctcacaaccatattctccacagataaattcttagattattagaaaagcttgtcagaaaaaagatgaaacaaaccggtccaaaaacgcagttagaaaacgcagttagaaaactgaaccacccctacctcaattgacaatgtcaccatcaaccattgtaaacaagttcagaattctactgggctcgaattattttggaagttgctcatttaacagagcgctaagcagatgacccaaaaatttcctcaatgaaacatttcgcagttcatgaaatcaacagactgcaacgaccaaaagatgccggtaaccccaacagtttttttttcccca

SEQ ID NO: 8612 - DNA, 430 bp, Zea mays
tggaggctccaccaaccgtagtaatctgtagaatatccactattagcatgtcctaggaaaagaagtgacatacacttgttgcagtgacaagggcaactggtctgaaacatatcatattcatatccttttgttcatttttcttttacaattccttgcatattaagcaaataattgttttaatattatagggagagggttaggcaacgattggctttgtaccaaggtgtatgtccggttcaaatggaattttctgatgatgctgagaagacatttggcaatgctttgtcttatttgctggtaaggacttctacaatctatccttgcattttttttggcaccagtttaattagtactgaatgtatgataaagacaagtttaatttgctatacctgtgatctcaattttttttttatcaattgttatgttacca

SEQ ID NO: 8613 - DNA, 516 bp, Zea mays
ctcgtacccctgttcgttattttattcaccagctacctctccgtcgtcgcgccaatcttgaacgcaaggtgaaatgtccaaggtagctcttgcatttgcaggcaagggtgtccgaaaaattcaagctcctcctcgcagatggctctctacgtctcaatactgactccactaaaaagaaacgaactctatttatctttactagcaccctggttttctacttttctccctcccggctctttgacattttcaaccaaaacgctgaaacgcatgcctggccgccaccggccaccctgttaatccttttaaagttggttctagctgtcgtaccgtccgtactccgtacaacccaaccacccccgccccaccccacccgttgcaagtcaacgtccgctagctctctcccctacctccattgggccacgaactcaagagagctgagctatggaggccgccgatctgcgctggtgctgtggtagcagcagcaacgactgggacctacacgccgtggtgcgcttc

SEQ ID NO: 8614 - DNA, 478 bp, Zea mays
tgctagcatatggggaatgatggctttgaggttggcaaatgaagacatcctacccttcaattacatgtcctatgcaattgagcttgaggtaagacgtctccagtgttcactaaatgctgcttctgtaggccagtagagccactcagacacaggggacagaggaaaattaacatagatatccttgttactatggaaatatgacgaagccctaaatttcttccggtggcaggcatacacaaaaacggtagagaatgaagtgaagggaacaactgtcacttgttcccctctgtacaactcaatcagaactctcggagcggcagctaccaaagtgaataacgaacaaaaggtgacttcacttgagaattgctgctcgagttatgcagaacttacagtctaccatactgcattttgttcactgtgatgatgacaagaaacatgggcactttcaggaacttcaaaagctactcttgagcaagca

SEQ ID NO: 8615 - DNA, 483 bp, Zea mays
tgcttcatgattcatactgtcaacaagatgacattattggcaatgactaacaaaggaaaatgacgaatagacaaaggaaaataaactgcacttggattgaaaactacaggcaggccaaaatcaatgaccttaattgcagctgattcttccttgtttgcaaacaagaattttttctggtttgagatccctgtgcatcactccattcctatggcacttatgacatttcacaagttaactcaccatctggattatgaatgagttaaatattggagagaggctaaaacgccatggagttttaataaaagagatggttcaattttaggaaatgaaaagagagcatttttaaggcaaaacgggaagcttcaaataaccatttccttctttgcctaaaactcatacctgtgggaacaaattaagaatgcaacaagttatgatatctacaagaatcacaactgctacaataggctagtagcagcagcagca

SEQ ID NO: 8616 - DNA, 1080 bp, Zea mays
tgccgaagagctggccacctcatgtgcccgtgtgggtgtgagccgtcggcgggaagctgctggcactgtttgccttcacgattggatctgacgaagatggaactgagcacagcgatgtcacgaagaagaaaagatgttttatgtttttttattttgtgggtcccatcacataacccaacccaaatccagaaaaagcgtgggaaatgaataaaatcccgtatcctcgtccctaaccaacaccatattttctatcctcagaaatcaaatgccacatgtgtagtaatactgaatatataccatttaagaaccatggcaataaaaaggattactcagtcagcaacatcaattcgctgaaagagaccaaaagttgcaacagggcacagaacatttgacacaatatgattgcagaaactactcacgagtggagcataccaggattgttgtttagaacccttagagcaacaagagcgtgttcatgttcttgaaaatcaacaaaggctacaccgcgtgaatgcttctgtatgcctttcttttcattcttcaggatattcactgtctaatggaggtaaaaaaaacaaagtaaccagatggtaccatacaagatctattcattcacaatgatgatttttcaagcaatgccaaaattttgagatcattggcctgctgcaactgcaataaaggcacgaacaggagtgggcaagtgaaagcttactaatccccggaaggtccatctcgagacccacaagcttgaggagcttgaagccgtccatgtccagcatgtggacgttgctgatcacaaggtcaaactggtcctttttctccctcagcagcttcaaggtcgtggttgcctgtcccattgttgtcactgcgacatcacaaatccggacaatttagcgcatgtatagctgtatacaagtcaaagccccccggaggaacacattatacatgtggaatcactcgactccgaggaaagttagcgagaacgattttttccttacgttgaacaaaaccagaccacagtggagatcggaaatggacagccagaaattgcaggacacacaagtgtacagaaatcgcgca

SEQ ID NO: 8617 - DNA, 518 bp, Zea mays
tggtgggtcatcgtcgcggcccagttcgggtacatcgtcaccagcgcccggtgcagggacacctggacgggattcaccacgcaggccttctcgggcctcggcaccttcttcaagctctcggcagcgtccgccgtcatgctgtgcttggagacttggtacttccagatcatcgtgctcatcgccggcctgctcaagaacccggagctctccctcgactccctctccatatggtaggagcgtctgcgtctctctttgtgtgtgtgtgtgttgttcaccagcgctactagctttttaatttcatcatcggtctctgttccgtctttcgcccgcagcatgaacgtgaacgcatgggtgttcatgatctccgtcgggttcaacgccgcggcgagcgtgcgggtcgggaacgagctcggcgcaggcaacccgagggcggcggcgttctcggtgttcatggtgacgtcgctgtcgttcatcgcggcgacggtgtgtgccgtcgtcgtgctgtgcctccgcgacca

SEQ ID NO: 8618 - DNA, 599 bp, Zea mays
ttgcttgttgcctgcagtttgctctagaggatccccctgtcgtagaagtcacataacttatttggaaggctcagcatgtgttgcggatggcacgttccacttctcgtcttctcctagaacggcggtatgccacatgcaagtgcccggcccgggagaaccagtcgtttggcccctggacgccttaagttcacaaatcacacagatatatatagagcccatgcactcatcacaattaatcgcaccgccacctttaccaccgagagaggaacgcgaacaaccaacgatcgcctcatcgccatggcacgctctgtccccatcgcgcctctgcgtcctgctccccctcctcctcctcctcgtctccactgcgtccgctgcacggaccgtgggcgacaccgtgcaggacgcgtgcagcaagacacaattccccaagatctgcgtggacagcctcaccgcaaagccagagagccagaaggcgaccccgcgccggctggcggagctgttcgtgaacatcgcggccgagaagggatccgggatggccacgttcgtgcacgggaagtacaacaacgccaaggacagcaccgtgttcaagtgctacgaca

SEQ ID NO: 8619 - DNA, 556 bp, Zea mays
tgccagactagctaatgagtcaataagaacaacattggacgaaaaatccttaagtgacttctcaccaggcgctcgacaaagacgcaatttgatgggctgcgacagagatcctaaacctgttgtcaggcgggatcctcccaaagtcgatgcccttccagaatggctgagcacaactgggaaacgttccaacgaagatagggcactttgcagtttatggactaggaatgccataggagttttattcccatctttatcatttggaagtgcaaaagatataaatgctttgtatcgtctgactgcctgatgacgcaaatttggtatgtttgcctcagacaccttttccctcccaaatgttccacatgacagataggttagcaaagccgtaacaactccacttccgatgaactcaaatgtcgaaacaccatcacccttgctaagctcagacaacatttcagctattatatcatccaattgctcctcaatattgcacaagacatcaaaactattgtcagacactacctttgattttcctttagcttttgttttgatagtgtca

SEQ ID NO: 8620 - DNA, 500 bp, Zea mays
ctcggggatctgcagactatgcggagcaagaatcgtcagacgacgaagacactgcgttcgacatagctgctcggctagggtcccaaattgaggctgctccaatccttgacagagtggtaccaagttctttactaaaattagttctcttaattcaatgcattatgtctagttttgtgcatcctaatgttctaacttgtgaatagggaaactctatgctcgtatctgttgttgaacttgagcgtatctcacagagaacttcagacagtactatgctttcgttactatcagtgagtatcaatgtttaaaagaaaacttgtttatttgtatgttctaacatatgtctgtaactcatatttcaattacagagggtatcacgtcgtcttcgtcgtgcagcggctcgttgtggatgccggtctctagcgagcgttgacgtgcagctgcctgtgcctcctatgcagccggacgttcagcgtcccatttgtgcagttggaccatctaca

SEQ ID NO: 8621 - DNA, 499 bp, Zea mays
catattatggcagcacagcatatggtgcctatggcagagggtatggatatggtgctacttctggctatggctcaggttatggctctgcatatggtggctccatgtatggaggtccatatggtgcctacgggtcatatggtggtgcctatggaggtggtgcgtatggtgctccaggagggtatggtgggggaggatatggcagctacggtggtgctggaggcatgggtgggggtggcagcactggtggtcggggatccagcagataccacccttatgggaaatgatcatccattctctgtgtttctctaggatctgataataaagccatacctttcctcgtttctgctactgagaaaatggaacattccattcgtcttgttgaatcagcggcatctggacatttttttccttggaacttgcattgcacatcaatgattctatagtctatagtcgctgaaccctgaaccgcccccaccccgagctttctgtagaagctgca

SEQ ID NO: 8622 - DNA, 466 bp, Zea mays
tgcaaccaagttaaattagatgcaattgcacattgagtaattacatttaaaagttcataacagggtgccttgaaaagataaatggatattttgaaaggctttattatgaacaaagaacaaggacctttcctggatcaagaggaaaaaataggccatagggcttcaggtattcgttcagctctatccatccaactccaggttcaacaactacgtccatatcctcaacattcagggattttattttctgtagagaatttacgccatgatgaaccacaccacacatttgaacaaaagaaacgaagtagacagatcaaagctcgaatattcgattgcttcttaagcattagaatacagttctaactcattcacaaataattcgttttcgtaacatcattaacacctagctatagctatatgctctagattatgtgtctgtttggctcctgccactatttgccttagccgc

SEQ ID NO: 8623 - DNA, 504 bp, Zea mays
tattgtgacagctgctgcgatgcctccctcagtcgctgagacatggagcccgccacgtccttagcggcagcggctgacagaattttgccgctcgcgcagaaaatggcccacgggtcccgtgcggcaccctttgcccccaccaccgccgttggcgaagtggtcgccaccagaggcgggacaacaaccagttgcccttcacccgaacctgcaccatgatactggttaaagacctagtcgagccaaaaagaagaagttcttaacttaccaacaagataatcctcgacactgatgtccgtgccgaagtcggcaatacgtcgcgccggcgaaggcggccttcgtcctttcacgagcccgcccaggggtggcttgctcccgctagaggcggcaaccttcgcgctcgccgacgccttgctatgcccgggggcggctggtttcacagccgacaccggtttgctactgccaaaggcagcagccttcgcgctcccccgcgcctttttcgcctcg

SEQ ID NO: 8624 - DNA, 1027 bp, Zea mays
tgacgccacggctgcaaatggccacaacaacaccaacaaacgaatgctcgcggagcacatataacacggatcgattaaccatagccagtcactaattctttttaaggcgtgagtgacacattagtgaaacttggatcgaggcacgaatattattggcaaattgggctgccatcatccaacacatggctaacgtgctaggcacgtgagacacatcacgcatgtacgtataatcgtgtccggctgatcaagctatagtctagaggccctcctggtccatggcgaggatggtgctgaggttcatggggtgcatgtagtccgtgtcgccgtgcatgaactgggcgacgatgatgcggtttgccctctccgtggggtggaacgcgtcccagaacgcgaacacgtcgcggttgtcgcacacgttcgacgccgccgtgcacagcccgatcccgttgtacgggccctggccgcagcacgccactgcgcttgtttgatgtcaggcttaggcaatctgaggttcatgcatttggttggaaacaagagagcagtgagtctcagtcggctctaattaaccagtcatggtctccagatggatggtacatgtcgtctggttcagcagatcctgtgatccacatcttcgacatcaggcatcatggccagaatccttgccagtctgttcaggcacaccagaagcgggtgttcaaagctgtttggcaccgaacgttgccatatctgacctccatatcatcggacctcaacattgggatccacaaatattcatgaaacgttttgggctgattttggcgctcggcaatttttttgttgtggattaggaacgttccatgaagacctgtgaaattttcaggactttgcatcaatcgaagatacagcaaattcagcatgctttcgctggacctgcttcgccattgactttctctgtgggagaaccatgcagctcagcaggctcctagcgagccagaaccgaaaaggaagaagataaaggtttttacgcatcggccgcgctatattgaac

SEQ ID NO: 8625 - DNA, 668 bp, Zea mays
tgcaatgtataatcggaatggtactcctactcgtggtgcttttaatacgggagccgaagataagtattttttaatgagatcaaatgcttcttgctgttctgccccccaagcgaattcggcatcattcttaagccgaagaataggggtgaacgcatcaatcttcccgggtaggttagaaataaaccttcgtaaataattcaccttgccgagaaacttctgtacctcgaccttacaggtcggaggtcccacattccgaatagacttgattcggtcagggtctatctctataccatgttcatgtatgacaaatcctaaaaacttaccagccgacactccaaaagcacattttcgtgggttcattttcaaaccataccgacgcattttatcaaaggctttgcgcaaatcagctatatgagaactaaactcagccgatttgactacaatatcatcaatgtagacttccacagtgtttcccaacagctcgtaaaagatcagattcatagccctctgataagtagcaccagcattttttagaccaaatgtcatgacaacctattcaaataaaccaatgaagcctggacatataaaggtcgtttcagacgcttcttcttcgaccatgaaaatctgattatatctggcattaccatcaagaaagctaataattctat

SEQ ID NO: 8626 - DNA, 508 bp, Zea mays
tgctcgcacctcgcggcgcatgcagtccctgcagcatccatcggcggagcgcaaacgccgacgatccgcgtgcgtacatcggtacacatgcgcctttacgagccgagcacgcacgaagggcacgctatgccgagtgacgttagccctcgtccccaactgcgcgaactcccgcgacaaccgcgcatgtccccgtccgtcagccccgacagcgcgtgcggctcgcgctcccgcctcggcgtcacgcgacggcgggggggcgcgctgctctatacacgttccgccaccgccaggcgcggccgcggcaacttggctatttagttcgagaattctccaggggagatggagcacggagtccctgagatcgatcttgctctcagcgtcggagagttagctgcacaccccccgatccccggccacgctccgatcgtacgaggctagctgctccatcatcgccctcttctgggaccctgcccctgccgtgagtggatcaatccatggacgccgcgca

SEQ ID NO: 8627 - DNA, 499 bp, Zea mays
tgagggagagcttcatctccagcgagagtcgcaaaccctccatgagttccccattccccaaccttctgattttgacgccgggtcgtgggcaaatcaggtagagcggctgcagattttggcgcccggcctcgggagtttgggagcttagcgactccacagtggaagactggtggacggcctttgcccgcactgcgtcttcccctgcttcgcgatgggaggctcccctgtatgggacgggactctgtctccggacagcttcaacacctccgcggcggcgcttgttaagaggtggaaggagatcgaggtcgacgattcccttcctgaatggacgtggaagccgtgcagcaaattgggggtgccgtcggaggtttgtctctctctcttttttttacgtattgttttccagtctccctttccctgattcaccttgttattttctgaatatgcttgtttgtcttgcaggtagaagggtatctagccctggaaagagtgtaccgca

SEQ ID NO: 8628 - DNA, 475 bp, Zea mays
tgttcaggaatcacaatagattgtcatccatatgtgatgctttggcaccaattgcatctgttcagactgatcttcattttctcttgctagaaaggctagcatcaccctctgcgctaatagcagaaaggaaaaccggtaaacacaacatactgccctttaaataaacagatataaagtaattatgattgttaatttgttacaaagatgcatgacaagtggttaaggtatatattttgaggagcatgctaaattctagcaaagatcttttgctcattgcttatatctattgttctaggccgcttaacgtctaggggactcgaatttgactaggaatccaaattcaaaatgttgttatggttgttctccgaggaccagaaaatatacctagtcagtttatgaccaactgatgaagttatggcaaaaccatggacaatgtcacatatcagagcagcaaaactcagccatatcctatcca

SEQ ID NO: 8629 - DNA, 508 bp, Zea mays
tggaaccaaaagctcctagcaaagacacaacccaccaaaatgtggtctatggtttcttgatcttggtcacacataacacatttgtcaggatggcttaaacctcttttctgcagacggtctgctgtccaacatcttccaagatcagcaagccatagaaagaatttacatttgggaggagaccaagttttccaaattaattcccaatactgagccttgatcgacctgatgaagaggccatcataagctgctttagctgaataaattccatcagtagcaaacctgaaaatatgcttgtcctccatgtctggatgaagctgaacagtttgaagttcatcccaaagatcaaggaggtcggcaaagacacctactgtcaaggcccctttaatatcagttaaccattttctgtctctcaaggcctcaagcacagttctgttgttcctaatcttttttggcaccgggctgctcaaaccgaaggtacactttgctatactacattggaatggatctt

SEQ ID NO: 8630 - DNA, 706 bp, Zea mays
tgcgactgcgagtgaagttaatttaggggtgtggcctgtggcaaacctcctgagggccgctagcttgtgtgatgtgttgtacgtcggcctccgtccggccctccgcgcagcagaacacagatgcatgtgtgcagtggtggctagctgctgctgctagctagcttttccctgagaatgtgcgtgggtgccgtgcccgatggccggtgaaaagccctttgcgcttccgcaggatccatgctagctagtacgtcggttgcacacgtacgcagtgtgtgcgagtacggaggaagacaagaaaggccctgtttggcacagcttattttcagcttcttcacaaatttaagccgaagttctgccaaacagacagcttctgcagcagcttatcagtttagctgcttctcaaaatgaactaaaagcagtcaacaagcataagctgctttttaccagcttctcagataagctgctttttcaacaagtagtagctgtaccaaacagggccatagcagagagagagagagagacggaaaagcatgcagaaaaaacgttgcgaccagcccaagttagcagcgtcaagtcacgctccatccatcatcacgcattgcggttagaggtggcgcgcgctgcttcgcgacgagtcatccagagagctagcgcgctaaaaagtcagaagctatatatatggcagatctctctctctctctcttca

SEQ ID NO: 8631 - DNA, 550 bp, Zea mays
tgcggccatgattttgacgctgaagcaagaggaaaccgagtctggtggagcagcgattctcctgcgattatggtgttgctagatgggagaacttgctacaacggtggcatggagcagtgtgtgtatgtgtatatatatacgcacacacacgcctttgtgcacggaaaaagggccggcgatggaaggaaggaaggaaggaagactagctcgacgggtcgttacgaactagccgcctcgtttgatcggtcggggtgagggcaggccaaagcgggtgggtggatttggcttttcctgcggctggagggaccgggaagaagagtcttggaagctggaacctggatggaaggtcggcgacgggcggcgcggggcggcagaggagaggaacgtgtggaatggaatggaatggaaggatgagcgcgtcggaaacgcttctggaagcgaatgacgaaagcgaggacggatggccgcgtggttgtcgctgtgaagcgaaagcggaggcgtgtgcgccgcgtgcctgccccgctggtctctggcaggggtaccgagctcg

SEQ ID NO: 8632 - DNA, 537 bp, Zea mays
tggaacgggctcaagatgcacgccaaccacaacctcatcacaggcttcctcaagggcgagcacaagttccaggtgagtgaaaaagagcagatgcgcttgcagtcttcggacgccccgctggaacttgggtgctcagattctgtccctttcttttttgttgttgttggtgactacagggcttcacgatctcggactgggaaggcatcgacaggatcaccagccctccaggggcgaactactcctactctgtgcaggcttcaattcttgctggcattgacatggtaagccaagctagcattgacatgcttcacgcgcgccgaaagagatgatgatgctgataattaaatttttgcttcagatcatggtgccaaacaactaccaagacttcatcaccatcctgaccggtcacgtgaacagcggcctgatcccgatgagcaggatcgacgacgccgtgacgaggattctgcgcgtcaagttcaccatgggcctgttcgagaaccccatgccggaccctagcctcgccgaccaggggtaccg

SEQ ID NO: 8633 - DNA, 510 bp, Zea mays
tgcccagctcgtcgatcgcagccagcaacagcaacagccagcaagctaagattcatcatggcttacgaaatctctcggcctccataaatcacccatcgcaagcatgctctagcattagcattaccttgcccccgaaacgccagggcggccatcgaaacgcgagagccattcgaggataggtggaggcagcagtggcaaggaacgcgagggcaacaagaaactgcggctagcgatggcggacacgccgtcgccgtcgccgacggcggccgccggggcggagccggggtccgcgtcgacgccgctgctgcggcggaggggctcgtacacgcggaccgtgtcgcacgcgcgcgacgagctcagcagtttccgctccggcctgcggtggatgtgcgtcgaccactcggacgcctccagccccgccgtgtcctggctcgtcttcgccgcgctcggcgtggccgtccccgccgccgcgcacgcggcggcggcgccgcggcgcgcctacgacacgca

SEQ ID NO: 8634 - DNA, 556 bp, Zea mays
tagctcggtacccctgctgcacgaggtggtcgaacctgcggcccccggcgaagagcttctcggcgcgcttggcagcggcgagcttgtatcgctccatgtccctgagctcggggcggctggagtggtagggccccagcgcgaagtgctgcggcaggtacgcctcggggcgcgtggccctgagcacgcgcggcacgtccagcaccttggccgccgcgcccagcgcctcggcggcctcccgctccaggctctgccgcacccggctcagccaccgctcctcgtcgaagcgcagccccgcgcccgcagccgccgactgcacgaaccacgcccgcgcctggagctccgacagcgccatgtggtggccgcctagctagctagctcacggcggcggcggacgggcgatctggatctctcgttggtcgtcgactgcggctctcgtcgtgttggtccgctggctgagctcgctgctgtgcggtgtgtggtgtgcacccgtttgtttgctccaagttgcttcgtcttcgatggccctctcgctgctttctatagagaaaatggagca

SEQ ID NO: 8635 - DNA, 910 bp, Zea mays
tgccttggccttctctattgcctccttcgaattaggatcaaccaatttcttgatttcgatgtccttgacagcaaagtcccttacctcagtgatctgttggatcatgtgaaagtacaagttaagcgttctcacattaaagctgacaaacatattgcaaaaccagtagagtaagtttgccatctatatccacaattatgatgccagagagtggcaatatttctgtgctactataagcttattggcgttttgaacttttcaacaagttgcagttaaaatgatttaaataaaatgaacttagatggcaatagacatgtgaaaaagacatttggttacagataagccgtgctgttacattttttccaataaattctattattaaattatccaattataaaaaaataaaagttttgtgatactgacagttcagatttacctccactttccctcgtccagatgccacagcagcggcatttttggcagtggctagggtgacgctcgtgcttctttcgagtaaggcaaactgagtaaggggtcgtgttattaagtaaatttcttagcttttagcctggcctttcacttttattaagacccctttttccaaaccttttccatttccattatctcaccacgttttctttttccctggggttggttctttgaaaaaccgcggtatttaaagttaccttttccctttcccctaaaggttcgaattcaaccccccatgtattcaccaaaaaaagttaggggaaaaaaaaaacccgggtttatttaaacaaccctttaaaaaacactttatattaaaaccgataaagactctttttgcttctcttttataattaggccatgtccagatacccttcaaagttcatatgccccttattaggggcaaaatgaaatataatgtgttgtc

SEQ ID NO: 8636 - DNA, 481 bp, Zea mays
tggttcagagtaactgaaaagcctatatcagaaaatatgcccccactaaatgcattatcagcaacatcaattatcacagcattaggcaatccccacaagccagcaggaatactcccactgaattgattttgacttattctgaacctctgaagtgtcttgcaagaagagtaagaagcggggaattcacctgaaaagttgttggtcaaagccaataagaactggagcttgttgttttggcacaagaatcttggaaattcgccagaaaagtaattctcggatatgtcgattgtgttgagtggtgagaatcgacccaggttggcagggaactttcctgagaactgattttcataggttgagaatgactcaagaaactgcaggttccccaactcttcaggaagttcaccaaagaagttgttgtggtatatatggaatatcctcagcttcttcaggctgccaatctccttaggcagcatgccagtca

SEQ ID NO: 8637 - DNA, 478 bp, Zea mays
tgctgtggtgcgaggagaagatgagcaaggtggacctcaccgagaaccggctacgccgcgacgggtcccccatccttttcccctgttagaccgacgcccccttcctgcctgcctccgggggcgtaaaccgagaacctcccttgttagttcggcatgccaggggttaccatcccttcggctaccttatcagactatatatgtacatgcctttaggttggatctgaattgaaaatgtccatactaaagtaggggcttaagcatgttgctgggcgttcgtagctgggttttatgcaatgcaacgcaacataggcagcgtgcttcgtttcgccggcaacaggttttctgaaacccctttggtccctttcctcttttttttttctttcttttgggcagctatgccatgcaggtcgtcaggcgtgcggccgggtctgctgcgagtccatgatgcaactttagaacctagactagatagaaagca

SEQ ID NO: 8638 - DNA, 510 bp, Zea mays
tgccttgcgtggtggctgctgcatactggtggaaccctcagcgccaaagcgtgaagagaagatatcgttgccaaacattgacctctggaatcctggttccgctctcatgccacccatgccaggggatccaaagaactccttaaatatatcatccgcactcctgtgattaaaatggggagcggtggaatgagccccgccagggaagaaggggaatgcgccagaacctcctgctcctgggggcggctgccccttgagcccttcttctcctagctgatcatagattgcacgtttcttgggatcgctaaggacctgataggcggcacacaggattggtcaagtcaacagatgcaagaactgaactagtagcagtaaaaaaagcgaatcatggggtgaaatgcataattcggcggtgcagctaatcagaaactcgaatcgataagctaaaatatggatcaaaagagagacatctgagaaagttaaatcctttgcagtattggcgggcgtggtcca

SEQ ID NO: 8639 - DNA, 507 bp, Zea mays
tgctcttttccagtttatcagagtactggctggacagatgtaaatctagcaaacctccatgttgatcattgtccggcttcaagtcattgcctgtagattaaaacatttcgtgtcattgtcgaagttctgctcaaatgctatatggtacaagtgtacaactacacccttgatttgtttaacattgcatcaaacttagcttactgcttaccttgatcagacaggttcacaggtcaaggcccaaatgttataagatagcaggactgatcaattagctgccaccatcgatggaataggagagattacgcgtgagaccaagaacctagttattcttaggcttccatgtagaaattgcatagagtatccttcctttccagccttgtaggagccatccgttgtcttcatctatgacgaagtccttgtgataaatgtcttttactttgtccatggctttcatcacaatttcttggtttaacggagactggacaaatccagccctgaggttcctca

SEQ ID NO: 8640 - DNA, 472 bp, Zea mays
tgatcgtctcgtctctgactagcgatcaacgaccacgacaactacgctagctacgcgctgagatcgatatctctcaattatgatgagttccttcctaaccctgacttctgtccacgcaaaaggtgtcgtcgtttttcttgacgaatctctgccgaacgccaggaaacctgatcgattttgtaatcgtttttattcacggaatctctgccgaactcaggcttcacgaagtttatactatggcagattatttgactactgggccgaattaaatacccggtccagtgaggcccatctagctagcacccctgggctccacgttggtgagcagcagccgcaccccgtgctcgggctccacgatgagcctgagcgccggcgagtgcacgtaggccggcgacagcgcgagccggaacctggacagcacgagcgccagcaggaccttgagctcggccatggcgaaggcctggccgaggca

SEQ ID NO: 8641 - DNA, 488 bp, Zea mays
tggttctcctattggattttagagaacctgagactgccaccaagaaacaagtcaagagtttttccttcctagcttttgtcgagcttccccttattgcccacccaccaacctactgggcttctcccacaaaacagtttggagtgccttctaatgagctagcatctcccacccaaagagaagcaaaatccgaaagaagaaaaactggaccactgtcaaacatgtacacagccacaatcacatagaataataagcaatgagaaagagatgctagaccagcatacaggttagaatagcggctaacaggtgagaataacgcatgacaaatagacaagggtgtattttatttacaaaatgttccttaaatggaaaataatgcatgtactggtcaaaagtttgatgatatagatagttacccaaggcccaaaggatctaaaacctcaactccttttggtaaagtctgtacactcgtgagggcctttcgagcagca

SEQ ID NO: 8642 - DNA, 517 bp, Zea mays
tgatgcatatatggtcgagcatccatgagtgacgtgtatatgcatgtcagatttatcactagctagctagctagatgggatgcctggtcgatcgatcatcgatgtagctgatcaatataagccttaagcacgcatgcatatatgaccagacatgcacgccgtcgttgcatcacctcacctgtatctggagtcgagcggcgagacgacccacttgtccgacccgccatgcgactggctttggccgccggacggcccgccgagcggcgggaggatgaccttggacaggttccggaggttgaaggagccggagccggagccggatcccgacaccgtgccgccgccgccgcccgtgctctcaatgctggagttgttcttcttcatcacgcaatgctagctagctagctgcctgcttcaattcctgctccagccagcctagcagctaggatcgatcagcagtttgtggactgtggtgcgctgcagctcgctggacggggattacgacgaagaaaaagcagca

SEQ ID NO: 8643 - DNA, 419 bp, Zea mays
tgataatcaggtatcagaccaccacccgaagcagctcgtagtagaccagcaggaacaagctcagtacattcagcagagttcaacttcagaccagtggggatgctgccctccaaagcgaccccctgatccgaagtccgagccaccatcatgccgccagaatgtggaggtgaacccacatgaacatccatagaagtgcaggagggagaccccgctcggacaccctcgggggctgggtcaaggttggcactgcccacttgagccgggtcacccccggcaacaccctcgggggctgggtagtggcctacactcctcgcctgagttgagtcctccccggcgacaccctcgggggctgggcacatgtcagcactattcaaaggatccaagctctccgccgtgaccacctctaaggtcgacgggcc

SEQ ID NO: 8644 - DNA, 562 bp, Zea mays
cccctgaaatacccctgccttcacatgttttactcccatacaatttaaaattattagtgcaataagttttcaatcggctagagaagtcgaaggagacatcacttggtgaaacaagtactatgccaattccttgcccttcattgcaaaccgatccatcaaaatataaagtccaaggagtaatagtaaggtatgacatgtccagtttatgagtatcattaatccgatgttctacaatgaaatccgctacgacctggcctctcatagatttcaatggttcataggccaagtcatattctatgagtgcataagcccacttaccaattctaccactcataattgggttatgcaacatgtacttaatcacatgggcttgaccagaaacagtgcaatgactagacagtaaataacatctacacttggtgcatgcataaaacaagcataagcataacttctcaataaaagtgtacctcatttcatcatccaccaacctccgacttagatatgtcaccacatgctcctttccttcagtttcttgtgtcagaatagccccaatgaccttgtc

SEQ ID NO: 8645 - DNA, 487 bp, Zea mays
ttgaggattctttagatatatctcgtaaagtgaaagaaatgtattgttatacttgttcagacattgtcaaggtattgcttttttattatccattgatcttcaactcttcacagctagtaaaattgtttaatggtagttgaagtccccctaatgaagttaaacatgcttgtaaaacttgttccctgtgtaaatactacttttgacctggttgtttaatgatattatgtttgcttgtgttgcttaacaatgactgtagataccttttggtcttcacctttacaccatgtagaatagttttatgcattgttttctgttacaaatatatatgtggcaagtttgatataagtaatacttccagcaagaggccatacagtaggcatctatgttaaacaaataaaaagatttagattctaatgcatctccaatacaatttcaggagttcaagaagcatgacaggaagcctgataagtacatcaaacattggtca

SEQ ID NO: 8646 - DNA, 467 bp, Zea mays
tgagacatccagtcacggaaatcagacaacgcaccactggcggttgttgttgcatcaggtaagcccaagccaaatcaatgttaaattagagataaccatcgttgttgtcatacccacacaacaccaccatcggaggggattaccaacgaaaacctgacgaaagtcacgggaaacaggaaagcaagccaggggttccaatcgatcagtcctccaatgaacgaaaaaaaaaactccctaataaaagatcactcctaagatggcgacggcgacggcgatgaggaagaaacgaatgatgtaggggaggggctgctatgtccatctggttgtttgtccctgctgttaaaccagcgcgatgctgctctccccgccgggcggcttgcggatcccgcccaggtagtcccgggagggggcctccccgtccgcgaagatgtcgctgccggtcatctccttcagcttcgccgtgctca

SEQ ID NO: 8647 - DNA, 532 bp, Zea mays
tgagagaccagaagaatttgaccaatacccaatggttcttaatcccgtaccaccaatattcagaatatcgtaggctgggtgtaccaaatctcggtccaaagtaaattgaactggaccagaaacccctgagaagtttgcactccacactttctccagtagtttatctccactgttgaaaatcctcagagaatctaactgaaggctacttccctttttagcttgcaattttgggtcagcagaaaaagacatggcattcccttctctcagaaagcgctcaacagcatgagcaactagccatacagagtcataagcatgcataaagtaagagcttccattcctagttagattattccacttggacaaaaaggcatgctggatatcagaatcagctatatgctgccgaagcacaagaacaccctgtgtaagttccatcacatcaggaataccatgcacagaagaatctatcactgcagaaagccagtctgttgcaatccatacatagccactgctcatcatgcccaaagattttgca

SEQ ID NO: 8648 - DNA, 500 bp, Zea mays
tgatttattttcagaaaatcactacatttaagaaaatcacctctgtaaaaaggacagtttaacagcttagattcagcctaaaagctctgccaaacgatacccttgagtcgcaattggctccaaattacaatgtccttgagtcacaattcggcggcgtccacacagcagattaacaaatctcatgcacatctatacattgcttccatggagacttccagagcaattactacatcaattggtgagcagacagaaggtgatgaatcaaggtacatgaagcaaactcttttcacacgcctaacctcgcgttcattttacagcatacaagcagtcattatgctccttgctgttgttccaaagtttaatatccaaacaagtaaacaacacacaacatatgctaatatttattcctcataacataacatcaaccagtgtacaacagcatgttaacgactaacgagaggtacttgtatatgcacccagagcactaccctgcggctcac

SEQ ID NO: 8649 - DNA, 511 bp, Zea mays
tgcatgggcatctccacgccggtgaggttgaaccggaaattgttcccggacaggtcgatggtgccggtcaccgtcttgcgccgcccgaagaggaacgacgggtcgccggtgagcttgttgttggccaccctgaactgcagcaggtgcctctcgagcgcgaacgtccaggggataggcccgctgagccggttgccgtccagcatcaggcccagcggccggtcgggcgtgccgccgtgcaccagcagcggcgggatgggcccgacgaggttgttgtaggcggcgttgaagtaggtgaagtacgggagcttccagagcgacccggggatgatgccgttgagcttgctgcggaagaagctggcggaggtgaggttggtgcgggagaggcacgccgggatggggcccgacacggaggtgaccatgaggttgaatagtgagaggtgccggaggttgcagaaggagtccgggatgcgcccgcccaggcccggcatctcgatgatgctgagcgtctcca

SEQ ID NO: 8650 - DNA, 498 bp, Zea mays
ttgacattccaaaatggggtctggatgcaattgataaaattcgcaggggctttctttggaggggctggaaggaggcaaggcaagaggaggtcattgtcttgtagcctggggtcgtgtttgccgaccactgcagcttggaggtcttggcatatctagttttcaagaattatgttgggcccttcgaatgtgttggctctggctacagaagactgatcctacatgcccttggtatgatctccaaataaaagttcctagaaaagctagagctttcttcatggaggtggtcattactgaggtgggggatggcacaaatacaaagttttggagggataagtggttaaatggtaagcaaattaaagaccttactccaagtttgtataatattatacccaagaggattatcaatagcaggacagtttatgaggcaattacagacagaaaatggatctctgatattcaaggtccactgaccgtgggaatcttaacagattatcttca

SEQ ID NO: 8651 - DNA, 518 bp, Zea mays
tgatacaatattaacaaatcccgggatacataaaactgtccaagcgacgaatgtacaaacatgcggtgacgaccgcaggaaggaagttggcgcagaccgacaactccagaattccatatacataaagctgtggtggtatcttcaggcagcaataatatttgactcgtcgatattatacaattccatgatcccgtgcagcagcaccagtactgtactcctccttttcatcttatacaacaccaaaagaatggatcgaaattcgtaacacatgacaacaggatgacaattacaagtgattaaaaaaaaaagcacacatgtgagggggggaaaggaaggaaactccgggaagaggctacgccaatgatgggaagatgcactaagctcaccggcgccgcctggagactacaggggaacttgtaccagtctgctgccttctaaaactaggcgaggacgtttggacgggagcatgctgtgcttggtaagaagaatgtgcggcaggctttgggcctgctggcgca

SEQ ID NO: 8652 - DNA, 944 bp, Zea mays
tgctaccacgttaaaacctacaaataaatcaatagtacagaatgagatgaactaaaactttgctgatcaaaagcaaggagtgcacgattgaagtgacatagggcaagtttttgccataatgcagtttggcgcaattaacctatgaaattactgaaaccagagggcgactctggagctaaggaaacatagaaaggacttaaagacagcaaaaagggcttcattaattttaaagaggaatgaagattatacttgtgggccgtgattctgcagtaacaggccaatggagcttgtcccctctccaatcagttattgaccctccagctccttcaatgacaggtaccagcgagaggaaatcatatggctgcaccaagccaccaaaaaatcagttaccgtagtgaagaactttcattcatccaggcagtaaatgtatattagattggcagctgtttcctaatagactaggctgttagcaggatttgcaggcgagacagatgaggaggcatagaaggagcaattccattatgtgctaaaggctgcggaataagagctcttagtcctttcggcgtagagaacgaatcctctgttgcaagaagaagggcaatgccgattgtaaggttaagtattacgtacgtcaaaaccagtcagtgactcatttaagtgttgtgcgaaaaggtagccttttggcaactgcaaccatccatagcgagcgacggaagatcaataggctgttttttcataagttgataaaaggagagagcagcttaatgagagaagtagcagtgagggcgctaagcaggtgtcaagttaattggtctgagagccaagccagctttcaatttcaagtagtaaaaagcaggcattaaagtaggtgagtaagtcaagttctctatatgcttgaagctgatacgcgcctttgttgccttctgtcttcttccggtggagtt

SEQ ID NO: 8653 - DNA, 492 bp, Zea mays
tggaatttaataagcaaccctgcatgctgcatgctttcttggacaacaggacaagccagaggcccagcatataaacaccaaatcttagtccaaaataaaatgatattggctaaaaaccatgttcgtagcctaattatttgctgaacagatctttcgaacataggccggcccacatagaccactgttgccagccactgtacacagatgggtactctgcgtagaggttgtcaagtcgctgtccagcatgttaagtcgttattagatgagtccaaatagctcaatcctgaaagatctgataggctggaaggaatctccccagaaagcaggttgtttgagaggtccagtgagaaaagtgactttatggccgtgaagccattgcatgcaagtcaatgaaaaaagctctaggacctaatactcaggtcagttccaccttgcccatgctgtcagattcactctaacaaccagagaaatgtgacaaggcctaatggtgca

SEQ ID NO: 8654 - DNA, 424 bp, Zea mays
ggacccctgaggatgatcttaatgcaatagcatttggactttaggatgtatcataccaaagattgctttgagcgcatccacagcagcctggttggatatttacagttttggagacccttggagatcattactagagctaaagctgcatatgttgttttcattactgggtaagcttttcttgagcgatatataactttttttactgtttacaccctgtacctaaacttgttgatctgtttgacatgggattaaaaatctaattatgatcaaagactaaattttgcagtgactcatttgaccgttttgaggttcaacatatttacagacaatctaaggtagaaaagccttttttatctccatactcacatctctgtatcattgtcaccccctatctctgctgtactctttgtgcaaatgatttgca

SEQ ID NO: 8655 - DNA, 435 bp, Zea mays
tgaaactgcaaaagattccaagtctatctttcaggtgctaaccttgaccccccaaaaaacattctctgctttcaattaaaaacaaaaggatacagaataattatgaataaactatgtctgtgtgaatttacattcgtatataatgtgtcctgcaacattgattttctgaatataaatatggaattaaccaacctgatgaagtgactgattgagatgataccaacatgaaaccagaaattacttctgttgaattaacactttttgcagccgccgcacttcaaattgtccctcaaggcctcaagcttttacactaaaccgtagagtaaacctcatattattcgttcttctgaagtttggttcgaatattgatacacatacactgtgcatctatatgtcatatgtttgactacttaagtttgaacctttttacagcaa

SEQ ID NO: 8656 - DNA, 451 bp, Zea mays
tgtgcgaaacaagttctttgggtagtactatcgatctgactgacagtcgggattttgtcacgttgccagtgaataatccgcgtggtgatggtgtcattaatacttggcgaaatgctacggcatgtatcaattctacaaccacaattgcctggatccagaaaagaaaccacccgcaaattattaactggcagcgcgtggagtgagagaaacagcagcgctatgtggtctggtcaacgcactagtgggctccagacgtcagtcacagggaggcgactccaaacaaaacacagtgaaggcgacggcgtgatggagcggccgagagctggaatcagccgccgcccaccaccccccatttcatcctccaaaaaaaactgtgacgtcatacaaaatttcccctgacctgttatttattattattaattagtaattaaagtactatctcagctaatca

SEQ ID NO: 8657 - DNA, 781 bp, Zea mays
ttgatgtgtactcacccttgctttcacaaaacaccaggttgcctttggtgcagtctatgctcaggtaaagaagaaggcgtcgaggaggatctccaggagttctagggcttcgacgagttcgaggattaggctagcgaccacccccagtcagctgcctgtggtgggttgtttatgttggctacgtttcgattctgtgtactttgatttatattatgtaaatggctctagtctgtaatattattacttactctttactgtaattcgaagcattgtgctatgatgagtcatttatgtaatcgctgtgtacgtgaatttctgatcctggcacgtacatggttcacattcggtttaccttctaaaaccgggtgtgacatgcctccagctgccggagaagccctcttggtctacgtcgccgcgaccactcaggtggttagcgccgcgattgtggtcgagaggcaagaagaggggcatgcattgcccgttcagaggccagtttacttcgtcagcgaggtactgtccgaaaccaagatccgctacccacaagtacagaagctgctgtacgcagtgatcctgacgaggcggaagttgcgacactacttcgagtctcacccagtaactgtggtgtcatccttccccctgggggagatcatccagtgccgagaggcctcgggcaggatcgcaaagtgggcggtggaaatcatgggtgagaccatctcgtttgcgcctcggaaggccatcaagtcccaggtattggcggacttcgtagccgaatgggtcgaca

SEQ ID NO: 8658 - DNA, 517 bp, Zea mays
aacaccgagacccccctgatggagctttgccgccttcgccatcttctctgtcggttggctcggggagtgtcgtccctgttgctgtcactaagcaccgtcgtcttgcactccctgcatatggctaaagcttccaagctgtcggtgacctcggcgtcaagagtgaacggccgcgtgcagaccaggcaccgcaaatctgggtgagccgggaggagctcgtagctgccgtagtgcctttgctggtcagacatggatgcgtgggtggttcttttaaatcccggaacacccttttacatctagcaacgtgccaggaaaagggaaagttcatacatgaactggactcgattaaagcaggagatctgtcctgacatacggatcaggtggtcgtggtatgcatcagtaaacaaacgcgcatatgtaaacctgccagcagaaggaatgaaagtgattggttaatcatacggtacacagcagaatcaaacaaaccagattgatacacgcaagaattgatgtttgagca

SEQ ID NO: 8659 - DNA, 542 bp, Zea mays
tgcctgtattctgtcagttatcttgtcatgtgcatcatctgctgaactacgttttgtttcataataaccaagcagactacactgccagtggaggagataagcaagtctctccaacagatgggatacgacgtggtgccttcagacgacgctggtcgatttgtgtgcaactacgtctactaccactcactcaagtttgcagagaagcatgggatcgggtctctgtttgtccatttccccctcttcctggcaatcgacgaggaagtccagatgcagtttgtcgcttcccttctagaggtcctcgcttccttgaacttccagtgaacctagtggtagatctaccacttcccggtggtgtattgttcccagattatttgggaaaggtttaagttgttcccaacttacctgtggtggagaataagatcgaggaatcattcgtggaattatgtgtgtggttcaaaatgtgtaggggaacaaaaacaagtcttctcaaagaacatgtacatgcagtccagatgttaatatcccaagcggtttatatgaca

SEQ ID NO: 8660 - DNA, 503 bp, Zea mays
tgctgctcctgtacaccaagcgtacgtgcaaatacaaatacaatggccaccaaaagcatcgcctcgctgctcgccgtggccctgctgctgctgctgctctcctccccgggcgccgtcgtcgtcgtccgcgcgcagcagcagcagcggggcaacccgtgcccgacgaacgcggtggcggacctcaaggtgtgcgccgacgtgctggtcctgctcaagctcaagatcaacgtgccgcagagccagcggtgctgcccgctgctgggcagcctcgtcaacctcgacctggccgcctgcctgtgcgccaccatcaggctcaacgtgctcggcatccccgtcaacctgccgctcgacgtgcccctcgtgctcaactactgcggccggaacgcgtccgccgtgccgggctccaactgttccttctgaggcatgttcgatcgatcggcaaccccgctccaattgtaggttggttggtttgttatatgcgggccgggtactgtataacagca

SEQ ID NO: 8661 - DNA, 542 bp, Zea mays
tggtcgtcgtcggggtcgaccgagcacctgccgccggtgctagcgcaagccgcgcagtcctccgccgtgaagttgtgctcgaaaaggaacccaagattcattaggcggtcgtagtcggccggccccgccccctggtatcccagcaccggcatcaatgacgacaccgtgcagttcagcggcagcggcggattcaaggtgtcgtcgggcctgtacttgccagcaagccacgcgaacgacttggcggcggccgagccgttgtcgtagtcgctacaattcatttgcgcccaagaagaaggaggggacggctgccgctgccgtgcctggcccgggcaaccgctgaggaagaacagctccaggtttctgctgctgatcctgaacggcgcggcgctcaggccggaggaggcgttgctgacgagattgaggttgcagaaggagccctccttctgcaggttgacgttggtgacgacgaacgagctgttctcgtacgagatgtccaggacctggtacgcccagtacgagttcttcaggtacaccttccgctc

SEQ ID NO: 8662 - DNA, 503 bp, Zea mays
tgacttttgccgtctgtctgtgacagaggaggaggaagaggagactcggtccaagccgaccgactccgatatttcaggcgcagccattgcggtaggcgacgaccacgccgagagggtgcgcaggccggtgtgctacgagtcgagccggcggtcggacacctgcgaggcggccggcgacgtgcgcgtggtggggcgcgcgcagacggtgctcgtgggcgcgctggaccgggagtggaaggtgaagccctactgccggaagcacgacgcgttcgcgctgtcccacgtcaaggagtggacgctccgtccgctggtcggcggcagcgacggtgacgaggcgccgcggtgcacggtgaacagctcggccacggcgttcgtgctgtccacgggcgggttcacggggaacctgttccacgactacacggacgtgctgatcccggcgttcatcacggcgcggcggtacggcggcgacgtgcagggggatctctagagtacgaccaacaggc

SEQ ID NO: 8663 - DNA, 494 bp, Zea mays
tgttgctatctttacacggaggtggcagagaatcgttcagaaaaggcttagaaagaggtactttcacaagaacaagggtattctcctagagcaactgttctcgtcatcagcaaataacaacgctagtgacggtacgaagatattctctctggacgacctacagaaggccaccaacaacttcgaccgcacacgtgtggtcggcaacggcggccatggcacggtctacaagggcatactggcggatcagcgcgtggtggcaattaagaaatcgaaactcgtagagagcaccgaaatcgagcagttcatcaacgaggtggccatactctcacagatcaaccatcgcaacgtggtgaagctccatgggtgctgcctcgagtccgaggtccctctgctcgtctacgagttcatctccaatggcacgctgtacgatctcttgcaccaccgcgaccgcgagctgccctgggaggcacgcctagaattgcaggggggtcctg

SEQ ID NO: 8664 - DNA, 477 bp, Zea mays
tgcaggagaagtgcaaaacataacgatgaatgtgaaaattaaaagacacgaaaaattctatgctacaaggctaccagcatttctatctgaagcgatgctgcaaagctcctcgttccagataactcctctctgccataacagaaactagtataatcgacataggaaagcacttgaagctgttcaagggcgtcgaatgaaaacctgaggaaatgcagatagctgggcgtttcttgtcacgtgaacatttgctggactagggatgatcctgttcctgtgtgagaaaccttcttcagatgctctgtacagattaatatgcacattgctcgtttgcaggttgtatcctggaaaagcagagctagcatcttgtgtgcagaggatctgcagtgacaaggattgacgaaagatcaatctaaaggcattttctttttcaacccgagtcgagctttgcaaccttacatcttgtaggtcgaggtcaca

SEQ ID NO: 8665 - DNA, 470 bp, Zea mays
tgtcctacaccaaataaatgcaagaactagatggttgggacacttaaatgttgtgaaagctgacttacatgatgcagaagtgtacgacagcagccacaatcatcatgatcgacatgctatcaaggaacatttacatgactgcacttgtgaagagtagcaacatactggcaagccttgcgagcatgcattggccttgctaacagcagtgcaaaacagaaatgtgaagcttgaggatttgttcatgaatactactctgttccaatgttcagataggcatataaaagattgatagagccactgcctgacaagtcacaatggcccacagtagaaattccatttgatatgggtgcaccaatttgcaaaagaactgttggcagacagaaatttgaggttcaaaagttcccttcaaggcggcaacagttcagagacaaaacatgatgaaggtggcatcagttcaaaggcaaaaccaa

SEQ ID NO: 8666 - DNA, 493 bp, Zea mays
tgcacgatgtcacaatgcatgtgcgcggttttctccctccaaaattccttagatgtcgtccgccgcccgctccgttcctctacctgcgggcgccaagctaaacagctcgaatatatatatacatgcaggcggatgtggagacggatgaagtgtacgcgcagatgacgctgcagccgctcaacccagtaaggcacccggggtttttgatgcttctccgtctccgtcgtcgctgttttgttgacttcttatgctgtgtcggctcggctgcgttcccttccccctggccctctgtgtgtgcagcaagagcagaacgacccgtacctgcctgcggagatgggaatcatgagcaagcagccgacgaactacttctgcaagacgctgactgcgagcgacaccagcacgcacggcgggttctctgtgccccgtcgcgcggccgagcgtgtcttccccccactggtgtgatgagtgtgtattttgggtggcgtttcttttg

SEQ ID NO: 8667 - DNA, 491 bp, Zea mays
tgatgaacagaaccagtagtaagcactgaacagtaagatgtcccacattgccaataagtctgccagcttgaaatctgaatgaagaggccagtgctatatatgtttgaaacagatatagatctgacaccagcatgatggtaccatgaatttgacaaagtcactaaattgctgagcttagatgaccaatctcgtctatgcaccccatcgtgctaatgccctattacaaacataagaaacgccaatattctcaaggacaaacctttggttgctgaggattaaagcataatgaactatttaacaaacataactcgtatcagtaccgatcctactaacccagtcaatcgcaatcagattggatctgatactgatcgccttttgatgaaagtgttacgactccacactatctagttatctgcattgttcatggaaattccacacagcaatggccatctgcatccataccagcaaaccagaacttttatctgccctca

SEQ ID NO: 8668 - DNA, 542 bp, Zea mays
tgttggggcatccttgggtgataggggactacgcgaagcaggacctcatggacgcggaggtcgtgacgaagctgcagaggttcaacgccagaaggaagctgcgggcggcggcgatcgccagcgcgctcagcagcaaggtggcgctgcggacgaagcggctgatgaacctgctgggacggcatgacctgagctccgaggagctcgacaacctgcgggctcactttgcacggatgtgagtacgatatgctggtgtatatatatatattaccccttagcaatgagatgcatgacagcatggggtggtcgtggatcacgacggctgctggtggttgcagatgcgccgacggcgagaacgcgacgctggcggagttcgagcaggtgctgagggcgatgaggctggaggcgctggtcccgctggcgccgcgcgtgttcgacctgttcgacaacaaccgcgacggcacggtggacatgagggagatcctgtgcgggctgtccagcctccgcaactcccgcggcgacgacgcgctccggctctgcttcca

SEQ ID NO: 8669 - DNA, 495 bp, Zea mays
tgttcgtggtcggctccgacgggcacgtgtaccggcggcacatggaggggaggacgtggaggtggacgagccacgggcacccgccgtcggagccggccgccgttgacgaacagagctgcgccacaccggacacgggcgccggcgcgcactacgccgacgggttcagggggagctgcgacgggaaggtctgcacgaaagctgcatctttcaagccggtgaattgaactgcatttcaaagtctaggctcttgtgtgcgtgctgatggcgctgtgacatttgggcgaacaggtggcagccgtgcggccggtgccgttctcggaggacgccgtggtcttcgagctgcgagatggccgggtaagcaccgatagaaagcaacctcacgcaagctgctcctgatccgcctaatgagggcagagggcttacaattgcgccacgttgcatttcatgaatcggcttgtataattcctgttgtctggtttggtttcctggcgtgca

SEQ ID NO: 8670 - DNA, 471 bp, Zea mays
tgctaacctactgcttagctattcacactaccatggctttttaattaagtattaagggaagacaaactaattcatttttagctttgtgaaggggttccaaatgaattctgaacatatactccaatcgaataagtagcaataatgctagagatgagatatcacgaaactgcaaaggttggatgactggagttgacaaaaaaatataataattagttcgaaattagctcaaatttctcatgataaattactgagtgaagattgagtcaatatccatatcctaacctaaaaaatatcttttcaagccatggttgtaccatttttaaccaagttgcaatacttctctttttgtcaagtatagttattgcagacaaaacataaattaagcaaccgagctacaacttttttttcatcgatatgcaatgcacagaacacaaaaagtgatactcacattgtttcagtgctgaccatgca

SEQ ID NO: 8671 - DNA, 474 bp, Zea mays
tgaaatgtgccaaatatttcctgactcataagtaaccaatcaactatagttttatttagacatacacagagaatctttattgctgaaaaaatgttctagaaaaacagtgattgaactttggatggatttgcctaacttcctcgaaacagtggcgaattcatggaatgaatcggtagtggcagtttgtcccatggagcgaatttcgatcaagctaaagagattagcccgtgttcttcaatctaaggggcagaaacaagttggccatgtcaaatcacagcttgggattgcaagaaagattctccacaaattggaaatagcccaagacagtagacagatttctgtgggtgaagggctgagaagagaagccaaaaagagctgcttagtactggcatctcttgagagaaccattgttaggcttcgctcacgcattaggtatttaaaagatggagatgctaatacctcctttcataggca

SEQ ID NO: 8672 - DNA, 564 bp, Zea mays
gccgagtacatagcggcgtccactgcttcgactcaggcgctctggctggctcgcctgctcggtgatctcctcgggagagacactggagcggtggaactcagggtggacagccagtccgctctggcattggccaagaaccccgtgttccatgaacggagcaagcacatccggctgagatatcacttcatccgagactgcttggcagaagggagcatcaaggcgcgttacatcaacaccaaggatcagcttgcagacctgctcaccaagccccttgggaagatcaagtttgttgagctttgctccaggtccgggatggcccaactttcccacaagacgacgcacaagacttagggggagaatgatggaataagtcatgtggtcagcagcagttgcagttttgactgctgcaggacagcagcagttgcagcaggacaacatgcagcagtctttttgactgcgcaggacagcagtagcagcagtcttttgactgcgcagcagcagcaaccttttgactgctgcaggacagcagcagttgcagcaggacagcatgcaggggtaccgaga

SEQ ID NO: 8673 - DNA, 533 bp, Zea mays
actgcaccagctcgggtgcgtgatgctccagcgcggcgagttcgaggaggcgcaggagtggttcgaggccgccgtcggcgagggccatgtgtactcggtcgccggagaggcacgtgccaagtacaagcgcgggcacaagtacgccgcgtacaagctaatgaacagtattctcggcgagtacgacgaacccgccgggtggatgtaccaagagcgctccctgtactgtgtcggcaaggagaagttggctgatctgcaggcggcgacggagctggaccctacgatgacattcccgtacaagtatcgtgcgtgcgcgctgctggaggaggacaatgctgcgtccgcgatcgcagagatcagcaaggtcgtcggtttcaagatggcgaccgattgccttgagctccgggcgtggttctaccttgcgcttgagcagtgcgagctggctgtgcaggacgtgagggcgatattgacgttggatccaacctacatgatgttccacgggagaatgcacggggagcaggggtaccgagctcgaa

SEQ ID NO: 8674 - DNA, 512 bp, Zea mays
tgctccctcgaggaggcgcggaacctcgagcgcccgctgtgcatccccaaggaggagctgcttcctcgtccgccggccggggtgcgcgtggaggacaccctgctgctcgctcaggtcagtccgattcccattgcctgctgctttagtcccctcccttccgatcatctcagttagtaaatttgggacgcaagttttggtcaggatctgagagagggttcaatgttcggtctggatctgaggcagaagcaaggtgttgactaacgttgactagtaaatctgtgaatggcttacaactgtaaatagaagatgtgaagcacaatgtgtcatccacgtctgcctcaaaatagatcgatccaactgtgagtgactgtatcatggacaattggccacaaattgtttgagctgatctagtgatctaagctaactgccatcgatagcaaccatctcagaaaacattagcatgcttttggatgcgtccacttgagcgtaagtgggtgttgctgctgcagcca

SEQ ID NO: 8675 - DNA, 458 bp, Zea mays
tgttcgacaacaactgaatttgcagagcatttctaaacatttatacttctactggaccgttatatatggtatacgactattttcagaacagtttcagtatgcacaagattgccactaacatattgattaccaaaaatattttatatgactctttttttttatctaagattgttgtagataactagatgctgcacagtaacacggacctcctgttttgcagtaatgagaagtcaagacagccctctgatcgcaagccaagttgtcgtttgtttagttttaaataaaccaccccggcccaagaaagggaaagctacatccatttgtagctgaataagtaagaccaaatctgcatcaagaacgaaacgccattcctgcggtgcggagctctgctcaccgtagccgagcaggacatggttgagagacgcgaagacggagcaagcaaagacgtatcgccggca

SEQ ID NO: 8676 - DNA, 488 bp, Zea mays
tgcagcaacaatcgatccaatacatactaggttccattgcatcacacatcagtcactccaaagtccaaaccatcaaatcacacacccatcagatcacaaaggcaaagaggagagagagagagagagggatgatgaggacgacgatgagagagatatactactaaactatctatccatcaatcaatcaggtagcccggcagcaatcgcgtgccgcctttcctctcacgtacaccaccacacctcccaggctcagctcgattcgttcgttgccgcgtcaaatcgggacaagaagccagccggccctgttgcagtgttgcttcgcctgccctgctgctgttgcttgcgccacgcacgcacgtacctgaagaaagcagcgacggattgatcgaccggtggttcgctgtcgccacggccggcatgtcgtcctcgtcctcgtcctcgtcgtcctccgccgcctccgccgccacggtgttcccgcggtccccgca

SEQ ID NO: 8677 - DNA, 524 bp, Zea mays
tggctacccctatctagctagagatccttatctccttaaaactctcctaaaaactctcaacaaactactaactaataaccttcctagataatctcaactaatctcctaaataatctcaactaatcttttaatcttatctctaactatccttatctaatccccttggagggcccatggctgctgctaccgcagcccctccatgggccttcttaggccctgacaagcccttagtaggatataaccccttgtaaatgtttttcctcatgcattagccactgcatatcagaagatgacatgtacctgtgcagcacgagcggaaagcacaccataagcacctgccagtccatttccaagggggttattataagcatctgccaatccctttccacgtggattataagctcccaccagtccatatccaagtggggcataacttgggagtaacgggcctccttttgcagtaggtgttgatacagtactatccttcttatcagcaggaggtttcgcaagtgaacaatccagca

SEQ ID NO: 8678 - DNA, 491 bp, Zea mays
tgagccgcgacggtgtgcgagcgcgtggggaagagcttggtgatgcacgcggtgttgaagccgtgctcggagaggccgatcgccgcccggagccccgcgccgccggcccccaccaccaccgcgtcgtaggtgtggtcgaccaccgtgtaggacgactgcaggcgggcaaatcacatgagcaaatgggatcagtccccacattatcggaaaaagtaaacgttcacatcgcatcacactgcggaccaagctgctctgaaaacaggcaagtttcctataatcctatcccaaataaccttacccatccatctgaacagcggcgaaccgccggttccacgatcaacgaacacaaaaaaaaaatatagggccaggatttccgaaacgaagaaggaaacggatcgatcgagcgcagtgaggcggatcaggcgtaccgacgccgtggagaggagcctggaggcggaggccttggccctggagaggccccgcgagacgca

SEQ ID NO: 8679 - DNA, 481 bp, Zea mays
tgctcacctcacggatgacggatgagacccacgtgccagggatgagggcagaaacaggtatggacttgggccgtgtactggtggcctgtatgtgtaaattggtctggctatggcccacggacatccatagtcatctgcgtcgagtctattttttagcgtgctaaaccatgtatccatggccatgcatgtgtttttgagttgtttggtgcaatatgttacggatattgtatgtttgattttaatttcttcgttcacaatcactatcactacacctttaaagcgtgacaaaaaaaatgggacatgcaagattcgactccaggccacttcattgataatgtttcgcttttatcactatatatagctcacgtctatttgtattatattaaggtagagactagcataatgtttatgcattgcggcgtgacacaatcattttaacggtaagatgaggctaagaactggagctcaattaatgcttgca

SEQ ID NO: 8680 - DNA, 1078 bp, Zea mays
cggctcactctagaggttccccctgatttcctggccttatcgaagagcagcaatatcttctccggcatactagtcgacgttcgtgtatattcattctcactgctgccattctagtttgcagattagacttgcgcacagaagacgctgaagacttgcatggcgctaggaaggcccagagaccatggaaggagcgccaacttgttgggcccgtttccagatagaagatatttaaaaaaaacgataatgaaatttaaaaagttatcctcgtattcgtcagaataccattctcgttttctcatccttgggccaaacaacgcttccgaagcaagacgatttactttatttatctctcccatgcatagcttctttttaacaatgattcttcagtttagttatcgatgcattttgttttcaaactccagcagtcttttgctgccttctgtagcttctgatttcctttttttgttgtcgttgtgcttgactctgtagttctgttggcaggatcagaaaaccctcaaatggacaggccaccatcaatagtgagcactgcctttccaaacagagctccaaaagctgtaggcctctttgatacttgaacagtagcctttgctgcctgtataattcaactgtttaaatacaaggccagaaatacagaagaagatatgtaaatttatttttttcttacttgctgctggtcattgctcagctttttgttgtctgtcagtccagtaaaccctgatgaagcacccgagtcctttgttttaggcacagggtcctctaaatgcatattacccaaggaagcttcgcttgtaatacagggagcagcaccgacatttgtaatcactgcaggaactacagcagattcatcactcggatcttcaatgttatcaacatcaacagcaggaatcatttcagtgtcctcactgctgttcttcacatctgccaatgttaactgcagaaaaccatatttgcagttcaaatgaaatccagcaaagtgaatagagttctcatactaaagcggaacatgttaaattaaaatcagataacaaacctcttccagttttcccttcttcagggg

SEQ ID NO: 8681 - DNA, 581 bp, Zea mays
tgattcgaattcgagctcggtccccctgctcctactcttgatgtccggctccatcttccttggcctgtcctcgaccttctcagggaccttgcgctgccgcttctcgtcatcagcatcagcttctcggtagtagcctgctgggtgcttgcgtttcgcatctcctgtctgcccgctcctaacgcgatcgccactggcattggaaacgacaggaggcatcttctcgtccgagatcttgggggtatcagctagtagaacggctgtctcaggcctctgcgccagcggacgcatccggggagtggacggaggagcggccaacaccgtggtgtccaacacgccgccttgcgcccacttgatcaagatgccgcgcgcgagggcacgcaccttcccggcctcgtggctcagcaggccttcgacggccttgtccacgccggtggtggtcagcatggtcgtcgtcaccgggaccacatgcagcgtcgaaagcgcctcggccatggccgcgtcgagcagccggcacagccccttgactcgatcggcgtcgtcgtccgcggcatcgcagagcatctccaccagctcgctcctca

SEQ ID NO: 8682 - DNA, 508 bp, Zea mays
tgtcggcggagggcatcactgtgcagtccttcaacgccgatctgctgtacgagccgtgggaggtcctcgacgacgacggcttccccttcaccatgttcgcgccattctggaacaggtgcctgtgcatgccggaccccgccgcaccactgctgccgcccaagaggatcaattcaggtatccaaatgcatttgcctacagagttctaatggccacactggatgacgtgaaaaatgctgagctccacaggtgacctgtcgaggtgtccgtgggacgagctcatctttgaagaccagtccgagaggggcagcaacgcgctgctcgcgcgagcgtggtcaccagggtggcagaacgctgacaaggcgctaacggccttcctcgacggtccgctggtcgactactccgcgaaccacaagaaagccgacagcgccagcacgtccctgctgtctccgtacctgcacttcggcgagctcagcgtccgcaaggtcttccaccaggtgcggatgaagca

SEQ ID NO: 8683 - DNA, 497 bp, Zea mays
tgctgaataataatgctgatggaagagagacgaacgactgagttaaaaaggtttatttcagttttagagagatcacaggtgtttaattagctgtatgtttgtgtgtatatatatgtgtaaccaaccatactttagtgagcttcacctgctacctgctcaacgaccaacaatgcaacctagcttacttgtccgcggattgctatcgaattccacgcgctctggtagtctctttggtctggtccaccacccacacatacggatacggaggccggccgcgtatataaagctcgtccagagctgagctgccatgggtgagcactgactccatccatatccagcgagaagaagaggaggaggaggtcccggtactccggtcgatggcttgcgtggcggaccgtgaggctgcggtgagggaggtagcgcaggtgtacgagctcatcaagctccaccagcctctcctcctcctgcactcgcagcaggcgccaccgccgccgccg

SEQ ID NO: 8684 - DNA, 471 bp, Zea mays
tgacggagaagccaaaggtcacgagatctgcaaactcaataaccattccactgtagtctcaaactccgttactgaatcatgaaaatgaaacatgaaaattttctcatccaaggagaaaccctatgctactagagaggagttgattatagtccagacaggtgggatcagaggcagtgccttccatccaggtgccccatttcctcggcctggaacctaggtggcttacactgccaggtctaaatactaggcaaaaactcaggactgtccgtcttctaccctggcagtttaagtccaaggttgcaacttgcaataaagcatgcctcatgtgtgttcatttttattaaaataatgtggcaccacattttggacaacaataacctattgtgaaatttaaatgcattaattcactagtgactagtgatttcacaccttacatgtttaaaactactatggaacattaattttgttatg

SEQ ID NO: 8685 - DNA, 550 bp, Zea mays
tgcctggaaccccatcgaaccaaccaaccgtccctgccaccgcgccgccgtgctagacctgctgctgaatgctgatgatgtccaccaccccggaagcgtcccgcggcgccgcctcaagcccgtacatgcccgtcgcggcacacgagctcaggaggcagatgtccatgccgcccgccctcgcggccaccttcgcgtcatgcggctccggaggcggcggccacggatggcgaagaaacctagcggggggcggcgacggcgacggcgacggcgagctcggctggcgcgcgccccggccagcagcaggcggcgtgggggcggtggtccgcgcgctgtgggcgtggatcactaggggcaggaggaaggtggtcatcagccggaccggatcgtcggtgaaggagcagcagtacgggcacgaggagtacgcgcagaacttcgacgagggcggcgcggcgagggagcccgagaacctgtcgcgctccttctccgcgcggtacgcaaggcaagcggcgccgtgggacggggctcgccgtcgtcggcgtggatgaaagca

SEQ ID NO: 8686 - DNA, 462 bp, Zea mays
tggagttcttcagtcaatctttgaggttatctcattggagggtgttgatttgcaatctctgtttcaacgcattactcctggtgaaaaaaatgagctgtaccagtttcttctggatccaaaatggtatttaggagcctgcctttctgtcgtaagtataaaccaatgtaaaaagcttccaatcttcagggtatttgatggaggttctcccagcacttatggtttctcggatttgtttagttcaagaaagtatctgccacctcttggtgttcctgatcatttactcaatgacgactttattttctctatttgcccaagcgatgaagatatcataatgagatattatggcattgaacgcatgccgaaatcgaacttctaccagaggtatgttctgaatagattagacaagctgcaaacggagttgcgtgattcagttcttttaacaatcttacaagatctgcctca

SEQ ID NO: 8687 - DNA, 489 bp, Zea mays
tgcagctacagttccgacgcgaggatatggtatgctcaacactgcatggctgtatagatacgtatgcaattatgtagacacatgcatgcaagtatgcaactgctaatgctaagcatcgagcttgcatacatacatatgcatgcaggtacgactactgcttcatgcggtacgagaacgccaacttcttcgggcaggcggacacggacgcgggcgtgatcctggtgaacgtgcaggccatggacaacccgaaggcgttcgagaaggcggtggggaaggtgatgggcaaggcgacggcgcaggcgtcggcggcgggcagcgcggggctcgggcgggacaaggagcagtacacgccgttcgtgtccatctacgggctggcgcagtgcacgcgggacctcgcgccgctgacctgcgcgcagtgcctgtccacggcgctgtccaggttcggcgactactgcggcgcgcagcagggctgccagatcaactacagca

SEQ ID NO: 8688 - DNA, 579 bp, Zea mays
caggtcgctctagaggatccccctggaaggacatccatcgccacgccgacgtcaactgttctccatcaactggaagggaagtccagcaaaggtcccttttaatgttattgcagaccattccattgaaatgtataaatccagctttcttgtttgttttatagcatattttaccatatttatgtgaatggcggggcaggcccctacatgtatttctagcaatcaagcagtttcctaattttgcatctatgttttttttatcattttaactaattttattcccatttatatcttgcttatacaacatccagttttcttttctaggactagaatagattgatgtgaaggggaaagaatagaaggagaagcttaacttgtatattaagaggaaagatagaacagtgtacaacagagcatcaactgatttgtggaacaattttgtcttcattgtaatcttcttcgtcattgcataatctgtagatgttgtaagcgtagttaaactttattccatgcccaagttgttgcttatgtcgttaagttcttgagaaactcaactgattagattgaaattatgcggattgt

SEQ ID NO: 8689 - DNA, 486 bp, Zea mays
cgaatacgagctcggtaccctgctgtaaagctcagccaatcagtaatttctaagcacttttatccctatttttgctttagttccatttctaaataagcgctccatctttctcagtgtataattgaagggcaacaaagtctttgagtcactttgttaatactaacagcttatatttatgacttgagggagtatgtgcactagccaaaacttaatcaagttctgtgactgcaacccagaatcgacaatcactcaacacgtcatgtaattggttatcaatgattctttcaggttttaggttttaggactccagatgatgttgatgcttggttgtttcaaaacccaatgcgttgccctggggctttacattttcaagatataaatgccactcagataaagtatggtattcagacaaactctactccggtagcacggagaggaacatatgaagaccctaccttcaagttccagataccactccaagttgca

SEQ ID NO: 8690 - DNA, 851 bp, Zea mays
  unsure (1)..(851): unsure at all n locations
ctcggtacccctgcaaatgcacttctccatgcaattggattgtccaccttgccccgcccaagcaccgaatcctcaattcttggctgaatcaggaacttctcaatcttgcaggcagaatcagcatcaatgccagcagcatcaagcgaatcaaggaggaacatgcaagactgaaagcagtttaagaagtactgtgagaagggaagatcagcgcgatcagcgccatggtctatggctatcacaatcttaggagctagctgtttcaccaacccaaggatcgctggcagtggtggtgcacgagcagagcaaccagtcgggaggacaacaactacatcttcatcatcagcggcagaaatgaattctgcagggttgatcatatcagcactgatagcactgaactcaaagggaattccaaggtcagcagcaaactgtgcaatgttgtcacgcgcaagacacagctccagtggatggtgggaagctgtgttacagcgcttaagacactgaagcaacaaggtctcaccggcacgaaattggtgtgtgtctttatgcaccaccgaattcaatctctgatgactcgctagatgccaatgcataagtcatccggcatcaatgatctcgaccgccactcgtctgagccactcgcactgtctgagattgaagcgtgagtcaaggtcatcattgtgctgttgtcaggattctccatatatgaggacttcccccaccctcttttcttggggcatgccgggtgatttggtatgctntcccctttatgttcttctttcttcctctaattttctctggtggggatggttagttggtagcctacataaggggatcgggcctttttgcaacct

SEQ ID NO: 8691 - DNA, 475 bp, Zea mays
tgctcttgctacttttccatcttctgtaactccataagcaatgcatccagtgcccgcaattaacacacaaccatgcagctttcccattgtaccactagccagggccgccactgcatcattttctacataaatttttgcattgtctgggaacagatccctggagaacaaacaaggttcacttagcagatatacaagaaaatgatgacttactatcagttctgcatttctggctgtcagcatgttctgatttgtaatgacatacacaaaagcagcatcattctgacaatccagagcatcagggatgtccaaatgaataggcccaaacatttgagcatcatgatatcagcatttgttcaattgaaatgaagtggttgctgtggagcacaacaatgcaacccttccctttaggtgcaatactaaaatgcattttaattaacacagagaaaactataccggatccattccagcatcctca

SEQ ID NO: 8692 - DNA, 491 bp, Zea mays
tgacaaggctaacgacgagttgttgctgtccgtcgcaccatcacgtccggttctccaaataaattcagcagagcagggggcaatccagtgcatgcgctccgggacacgcaggtcgctcccggtgtttcccaagctacagaagcctgcctgcatcgtcggacaagaaagatgctttgttcctgtgttagtgttatactaagtacttacgagcacgaacagctagctagctggggtgctgttctcagattgtttcttgactcggcgttaccgctccgcgttctggcttgtcccttgcattggtcatgcactcatgctatggcgtggagggaatcgggggaaggtggttccgctgctcacgaacaggaacgggaacaggaactggaacaggggcgagcgagagcatgagcattgagcatcgcgttgctgcaagggcaagcaacgtcgctcccaagaacactgttggaagaaagccaacaggcgaagctttggca

SEQ ID NO: 8693 - DNA, 541 bp, Zea mays
tggctgaccagcgacagggacccccgcccgaagccgaccatgccggagccgttggcgagcgagccggcgttcaggttcccgcacccgaacgagatgcccggcaggctgacccgggtctcgttggtgccgaacgtgaacgtctcgttggcgaggacgccggcggtgctggcgctgtcgccgtagaagtactggtagacgcacaccttctggtagcagagcgggtagtagagcgcgttgcacgccggggacgcgcagccgagcgacctgtacgtggcggaccgcgccgggtcgaagtagggcgtgggctggtcgacgcagagcaggcacggcgcgcactgcgtccagatgaggtcgctgccggtgtcgaggatggccgagtagtaccgcgtcggcgtgccgatccccatctccatcaggtactcgccgtcgctggcgagcaccaggatgcgcgccgcggtgatcgcgtcgcccggcgccaacgccgcgagcgactgcagcgtggccacgcgagcactgctgcggcgtagcgctcgcgagagca

SEQ ID NO: 8694 - DNA, 452 bp, Zea mays
tggtcgaagaggtcatcgatccgagggagagggtacttattcttgattgtaacctcattcagggatcgataatcaatacacattctcatacttccatcctttttggtaacgaaaaggacgggtgctccccagggagacgaactgggacggatgtaccctttttgttgcagctctgcaatttggagttttaattctgctaactctgtgggggccatgtggtatggtctctttgcgatgggcgcagttccaggaatgagatctatatagaactccactcctctttctggtggcattccaggcaactcttccgaaaatacaacctcaaactcttcgattacggacatgttttctgctgccagattaaacatcattggatcgttggcgggcggctgggcttgacaggaaactgcctttccctggcgatcggtgagaaggacagtcttatttgcgca

SEQ ID NO: 8695 - DNA, 480 bp, Zea mays
ttgaagcatatgagcgaaaggaatgattatgtttgtctgtaagtaattcctcacggaactaatactcaggttaaattttcaactgtgaagttaaatgtagtggtcgcagagttgtgatgatagagaactgctatacagaagttaacaagcaccaactctccagataaaatggcattgctgtcatatcacattacacgtcgcataagaatttatggttcctgttctttgctctcagcttatcccactatattttccccatgttgcttttctttcttgcgctgcatcaattattagaaacactaaatgaagccttttgatcattacatccaaagtgcactagaaaaagaatgaactaggcagcataaacatgagaagcaagttgaacgaaacaaagcatatattttggagttctttcatgcgaggactgcaataaaagtggtggaagcaggtgatgttttatcaattctgcaattacttcaa

SEQ ID NO: 8696 - DNA, 486 bp, Zea mays
tggtgaggaaactgccactgtgccacattgctgatttgtaagattgctattgaaaagtttagtatgtatactttatgtggtttgatggttagtttagtagtctcttattatatccatgaatgaaactttgtgacgaatggattgctttttgatggatgaggtcgctgcatcactcagttttgctgtagtctgcaggggttatggtggatttggagctctgggtcaccatgtataccatagggagcttttgccaaggcaagtgaatggcccttgggaagggaagataacacacatttctactagtggagcgcatactgcagcaatcgctgactcaggtcggtctgattcactcattgtaaactatagttttgaatcaaatatgatactgtcctttgcaatcagatggtggtaatatcactagtcattccattctggtctttgctgcaaattaaactactcgtctctgattgttacactttgctaaca

SEQ ID NO: 8697 - DNA, 472 bp, Zea mays
atccgttaaatatatcaacatgcaataaaggagaaaagcacagagtattcattcaaatctgagttatcaacttaccatgttggtgattccttaagaaaaaaaaattattcccattttacttgtactggacactcaatttagaactgctgttctttaaagcgtattttcatagtatatcctatataaatttctcgggaaaaaattgtttgtcccattcgctgctttactgttcaataaaaaagtgaagttatgttgggctgcagtgcaggacacttttgcagtccaaccaatcagatggttggtcaaaggagagagctagagagggagagagagagagagcgggatcgcagagcagcagaaagcccgccattctcgtgctaaaaatctctcatttatttttatttatctctgccatttgcccgtattcaaaatccaatccctgatgacttgggtataatactggcacgaccca

SEQ ID NO: 8698 - DNA, 669 bp, Zea mays
tatagttcagctcagctgaaaagctcagctgcagctgaagaagctcaactcagctgaagtcaagttcagctggaaagctcagctgcagttgaagaagttcagctgcttttcaacaagaacactctaggtttctcaaacctaaccacggtcaaccatagaattttaaagagatttttgcttttcaaaaaatagcttttgaatatagaggtttgagctttggcaaacaccaaccttctttttggatccccctttatagtacgacgattcctatactcaagttaaataaaatatatttaagtaaactccttgagtcattggtgtctcatgtgtgatttctccatggcattgcttcataaggatcacaaacatctttgtctcaccttttgaagcaaactcaaatcaaaccctgtgacttgtaccatatcaccttatatgagttcaaatcatggcttcaagtcaccttactgatgcatcaacatgttataactcttcatagctgattagttcatcgacttagtgcaagtactctcttcttcaccttagccatggtaccttggtctacaagccgtcgcttggccttcaccttcgcttagttcctcgaagccctttccttgctatcttcaccctatcaagccattcttgagtcacatcctattgagcatccattaa

SEQ ID NO: 8699 - DNA, 489 bp, Zea mays
tgaccaccgagaacctgaggttcctgtcgtcgaagcaggccctgttcgacctggccgtcttccggcagtactatcaggtttaattaattaattggcattgtgttgcctgattcagcaactcgtgcttcatgtgctggaagaatcgtgagcctttctctgtttttccttttttcttttcccggtaggaatcgctgaatgcccggtacaaccgatcaggtttcgacaacccctggttcgtcatcggggtctcctactccggcgctctcagcgcctggttcaggctcaagttcccccatttgacatgtgggagcctcgcgagctcaggggtggttcttgcagtgtacaactacaccgactttgacaagcaggttgatagtccactccgggcataggtggagacggcgcaaatgaattctgtctgtttgatgtacttctacccaattcaggtctccatatgtgacagcctttattatgtaggttggagagtca

SEQ ID NO: 8700 - DNA, 527 bp, Zea mays
tgttacctttccattcaccacaagtgccagacccaccttaaaaatggacaaaaaatgtaggctagaacttataagaaaaggatcatgaaaataggcaactgaggtcaataatatgtaatttgctgatcatggattaaccagtccatgctgaatgacaaccatataggggcaaacaagcttggcattcagatgcatgaattttgctaccaaagaacaaagtgctgcagaaggtgcatcataaaggttcatgaactcaaaaggacaaaaggtgcctcataaggctgtccgcggcagatcgtgtaaaataggggatttacactgtagattatactgtttgtagagtgaagtttgagatagtgatgagacaagggatgagataaggtagctgctggagacaacctaaaaacaatagagtgaaatactgaaatgcatcatgggtccttaaactattcctgcattctcatctaggttcatgaactctcaatgtgaccatctgggttctttaacttttcaaatggttcattcca

SEQ ID NO: 8701 - DNA, 938 bp, Zea mays
tggtggggctgcaagtagagagattgcatttcagaatttcattttgccatcactcagaatggcataggactggataaacttacgaggccaacagatgcgtggtgcagaagatgctctccaaccatttgaatctacggttctccacaactcatttgcaacaacatccttgagtagtagcactgatatcagtacaagatatagtttgatagaaaattcaaataaatgttgtacatacaattcaattccatgcatatagcataactcaatcagtgatgcaccaaaaatttgtctcagacaaattgggccatttatttttaacattattccttatatgatgcatagatccatacgttgtgctgacttgattttaatagttatgtatcaaatccttactccagtcttttcatcagaatcaataaacagtagtgatgcatcgatgcatcacttccctaacagcctacagctagcaaaactgaggttatgaaacatcatgtgccaactgggcagatcgcctgtgagtcggttagtggacaaatccacaaatcccagggtgctgctgcatgttaaactacttaacaatgaaccactaagcatatttgccgccaaattcagataactgatgttagggagagcaaacagctctgcgggaggactccccacaaggaagttgaacgagacatcaaggtgctgaagccggttcaactgaccaaactgctcaggaatttcaccctttagtgaatttttactaagtaagattgttaccactgatgtaggcatctcaggaagctctccatccaacttgttgtcccttaaatccagcatctcaagcttatttaggttgactaaatttggaacatcccccgagatgctattgccggcaagcgcgagctccgtaagcatggcagctttgccaatcgatgctggtatggaccccttca

SEQ ID NO: 8702 - DNA, 1456 bp, Zea mays
tgtctctttggtagactctccaggatccccctggtatcggagcgaagcccatctcttcagatattatgaagcatttcaaaaagaattttcaaatacttatccaagaaatattctttcattcttactttatcattttctggaagttctcatcctataaaactaggtaatagagtgcaatatataggaagttggggatcaacgaaggttgatttcgtaattattgggttatgcatgcatcatgtttaaaaaaattatactaataaatcttcccctcttatggagatatgccacgaacgaggaaaactgcgcgcaagtccactggacctattggcgtgcctcatcatcagttgcctccaagacatgaagggagcagtagcggcagcaacgatccaatcggagacttggaagcccaagtggaacagcttcagacgaagctacatcaccgaaatagggtgtgggcacaggacggtcagcgtataactgagttggcagctgatggtcgatccttcgtcaaagagataaaccgggttgaagttcttcaccccttctttcatgatgagcttaacacgcagcacctttccttcgttgtcgtcgggaatcaactgggtcggcagaacttcaatcacagcatcagcatactgcttctgcggatctgtcacaccaagtagcaagtagtaagctctaacatgtctccatttcttgactagatatttgattgattgatgtcgcattttgctgtatatcctaggtttattgagaagcggttttatactgattataacatatatagttggaagaatgccgtaccaataaaggcatcaaaatctggtttcctggcctcgatactggccttgatgctttcaaggctgtgcccacgctctgccatgtcccgctgccaaagcaccggtagtattttagaggatactatactagaaaacagcagaaagatccccttcttcactggctcatgtggaacaacaaacataaaagtgtttctgctctgcaaaatggagggaagtttcaagagcataattagagtttgcggataaagattgcaccccccagattcagaacaagatgtattgatgcacgtacaacgtgacagataaatggaacccccagcatgacaggttaccagtccaccaaaccatagatttatcttgcatatgatacaactgcatgcacatcggggagatgcttgcttgctattttcatgatacacctatattacaacgacaaaagttaccccagaaaatagaactgcagtattgacatcctttgttttagagatgtttcctgtagattggaccagttccaactaaaagaagatggggggtcatgctaatagagtagacccaataaccataactggacttgttagaacttgaaggccaaatatgccataaatcgaatatgtgttcatcttctcatgtcccatcagggggatcctctagag

SEQ ID NO: 8703 - DNA, 480 bp, Zea mays
gaattccctctgttttcataagaagagacacaccatctttctcttgctcgaggtgcgaagtactcttcaacaagcttcctccagtatgttatagggttattctagaaaacaccattcaaattaattgtactgtcaataccttgtacctcataatcccacaaacaattaatactatagagaaactcacctctgggcgatgacgcttgtgatataaatactgcagtatcctgcgagaacaaatcccactctcgataggagtcctaacaggaccacctaactgcattccagtctgtgccaatggcggcctaagttgcggctgccgaggaataccaacttggggttgttgcatctgagaaaatggttgcaacaaatgctgctgctgccgttgctgaagttgtgctagtttatgctgctggataaaagcttgaagctgtgggttctgttgcccctggaaatgaagagaattctgaccatggagca

SEQ ID NO: 8704 - DNA, 422 bp, Zea mays
tggtcttacagcatctgtaactcgtgatagtagctcggtaggtctatttcaccaaattgtttgttgtttactaaagtttggttttggaacactgtaaatatttctttttctctacagcgtgagttttatttggaaggaggagccatggttttggctgatggtggagtagtttgtatcgatgaatttgacaagatgagacctgaagacaggtaggcatcaatttatatgtttgatgaaagaaattggaacaggcatagtatatcttctctccttggtctactctatcaaaaccacagtaaccatgtccccttctcttatgtaattccagagttgcaattcatgaggccatggagcagcagacaatatctattgccaaagctggcattacaacagtactcaattcaaggacttcagttcttgca

SEQ ID NO: 8705 - DNA, 472 bp, Zea mays
ttctttgttgctaagcagttccgttccctgtacgcgcatctgtagtagctcctgatgatcaattgaccacaccacaagttcatgtggtatggctattagttcatcgatcgatcggttttagtttgtagagtggaatatatatatgcatatatatatgtagtaagaataagaatggatatctgctcatgcaatagctgtaatataagaagtagcatcgatcatcgatcgtctttagaaattggtacttacctaggatgtttcctcccattgatgttcttctgcccatactttctccacaggtggccgtcgtagtgtggaacatgcgtaacaagggaccttgatcgcttgtcgttgttcctcctagaaattggaatcatcagttgatgcacatgaaggtcaatagaacaagttgttgatcacatctcctcgaaccgaaccacacacaccttctcttctgaccaacgacgacgct

SEQ ID NO: 8706 - DNA, 464 bp, Zea mays
tgggaaggcttttcctgtaacatgtagaccagcatggtgaccttgcttgaatattgtatactagaattagtgtttcctattctatgggaagctatcaagtgcaaatgcaccatgaagggaaccataaaaactttctcagtttgggtgcaaatcaatatgaaaagatcccagtggttcccttgaagcctttgatcgtgtcaccaccgttctgtttgttttttgagttttacagtggatggtttgtacaaggtttatttttttaatctccttgaatgtaaatgctatcgacctgctttcagtttcatgaagatagtaacactcattttgctgatcagggtgtgtgtggctgtgaacgcttctcaagcagctcaataggagacgtgtttagaacaatcataaagcgagatgggtattctgggctcatgaggggatggaagccaagaatgctgttccatgcacctgca

SEQ ID NO: 8707 - DNA, 525 bp, Zea mays
ctactatctcctttttattccctggtgtatatacaagtaggggtgaatgttcaccaactacagaagtacactagtacctgggctgatctcagccccaagtattctacatgtcggtcatggctgatgcaagccattactgggtggcctattgccatactgctacagtagcaaagatagatagatggacaacaaagaaaatagcctattgccaacttcctgctgcggcaaaacaacaggagaatgcagaagattatcttacaaaagggggaagaaatcacagaattgaaaataataatgaagagtttgttcctaacttcctattaccttgcaagtagggcatagctgagaccaattgcctgtccaagtagaggaattggtaagatcaatttccataagtggctcctgtaaataaagcgctaattgtcatatttatctactgacaaaaagaaaactgtgcaaacaactttctatggtttgacagaccaagtggtgtttagtcagtcttcaaaatgttcagtacagaac

SEQ ID NO: 8708 - DNA, 1148 bp, Zea mays
aactctagaggatccccctggaatgtttcaaatgcagctctggtgtagatactcctcgcttgtttttccaagaccatgtcgattttcagaagctgttcaggagaaaaagaagtgatgtctttctgggcttcacttgcatacagaccatctatatattgatcaaatctacttataaaagtatttagagaaactcttgaactgaagttattcctataaaacttactgactgtttctactctgtgagttaaggaaagctcagcgaagaagaagctggttaggtatgcaggaacccatttgtgccttatttcatacagtgactgcagccaattatcgtctctcaggccatacttgtcaagaatggagccccagagcatgtcaaaaataaccacggtatcacacccattgacacatctcttgagctcctcatgtaacccaggaaaccttgtgcgggcatcagtcagtctcttcttgcatctagacaagatgcgccatctgcaaagacgatggaaacactaaggaaatacttttgcaacagcagagatgtgattttatagatgaacttggttgttccattttaggttccgaataaatgatggaaatctagggctacacctgaaccggcaacactatatatatatctagtattttaatatctgctccattccaatttataattcgttgtgcatgaactatagtactatcgtctctctctcctgcaaacactgctgaaaagcaaaaaaggattgatgtcttgagtcaaatcttctccaaaacgagaacgcatatggttcgtagaagttgcattggagcgtagaaatccagttatcccccatacacacggtgcagtacaagttgtagttgttctagatggagagaaccttttcttggtgcacgcggcgcccccacagggggaggttcaatgcatatggaagaaggcatatcgaccggcaggcaagttgcaaaaataataacaacaccaaagttagctagggtttgatcatctccaaactgacctcactcacctctatcgcctggcctggtaaaacgatgccgtgcgttgaaagagttacccaatgccaatgcatgcgtgcacacgcctacgctgagcgtctgtccttgaatcaaaaagcatcatgatctcatggacg

SEQ ID NO: 8709 - DNA, 549 bp, Zea mays
tgcctggccggacggacaacgaggtcaagaacttctggaactcgtacatcaagaagaggctcagggagcgcggcatcgaccccgccacccaccagccgctcgccgagcctgccgccgccatcactgccactgccaccaccaccaccacggtctcccgccgcgcggtgtttggggacgtcgacctcatcccgactactactactactacaatccaggtgccgccgccgtcgttcgagggcggcccaatgctggagagcgtgaagctagcggtggagctggactggcccgtcgctggcgacggggtaacgtcaaggccatgctacctgcaggggggctgcttcgacatggacgcgctgcagcagcactgcggctccatcccgccggcgccggtcgtcccgtcggcctccgccagcgccagctccagcacgctgacctcgatggcggaagcggaacactgcagcaccaacaacgtcgccgccggcggcaacctcccatggctggagctcggggcaaacgcggtggctgacgccggcggccacgtcgtcggca

SEQ ID NO: 8710 - DNA, 447 bp, Zea mays
tcttaaaaatctgagagctgtaagaaagctgctacaggaactgtcgattatagattctgtaaaactatgatagcttggtaacctggatgacatgaatccagaagttttgggataggaggtaattctgaattgaactagaggactgcagattttcaagaatctattatgctgttgtaactgtttggttgggattccagatttttggcagtgaatttggttcagaaagttgaatcaaacacatccttgtcgggattctgaatgtttcgttatctgtttattggctgagtttctgtttagtcaaattggttttgggttgctttactgttcttctaggaatgactatgatctcgcccgatttgttcagtaataatttagttgtctgcgaaactcatgccttctccttttccataggaatatggagaatacaggtgtgtttcagtggaagca

SEQ ID NO: 8711 - DNA, 484 bp, Zea mays
tggcaaaccgcccgggcgagatctcctcactgcgagcctcggccacaatatatgaagccgaccctccctctcttcccttcctttcactactgccgccgtgagggagattgtgaagaacagagagagtgcgtcggcaccgatttcctgctgtgcgtgagcgcaagccgttcggctccaacctcgtccagggccttcggtaagcatcattcctcactcgatgtcgtctcgtgtacgcgtagaacacttcaccggtagtagcgcgtcaacagtcgtcgcgccgtcgggtagacgagtcgtagagctgcccgctgccatgggtagagctccctactctaccaaccacagtagaagttagccagaccgattcaccttcatgatctcgctctgaatcaccacacgcgggaatgcagtagggatcctgggagctaggctgcttttacgccgacgatgcaccgccgtgatggagctggcgtcgccgtgctca

SEQ ID NO: 8712 - DNA, 497 bp, Zea mays
tgcggccattggtactgccctgtagcaggcccgctttgctgcccgcacaatgtcatcgacctgcaagcaagcacagccgtataaccaacaataacaaaatcaatggggctaaagtaatagtaatacatggcagcaaatcagggaagtttgcaatgtatgcacatatgtgttcatgcagacatgtttaaaaagtaaggtatagcagtgtagcaaaaaaaattatattagttgtccatgagcaacccaaaaaatgttacttaattatctcccgaatgagtcattccactaccaaacaagatacacacccaattcttactagtttccagtcttctgcatagcatcaagcattacagccaagctaccaacctataataccgacattatgctgtgtgaccactttgaccacaatggctacctggtatgcacaagcacaactggacagacaaagaaaccaccatactcctaaacatggcaggacaatcctccaggtatatcca

SEQ ID NO: 8713 - DNA, 544 bp, Zea mays
tcgagctcggtacccctgcgacatatggaggagtagcccgtcgcggcctaatccggtaacgctgcttgtcatgatccatgggggtggatctggataaagcccgctgatcgtttcatggaactccttgatgttctcgtcaggccgccctcctttacctttcttcactttgtcgcacttggtgaacacaaacgtcaatccaatctgaaacagcaacacagatttattattattattattattgacaaggagcaacatagatatagtgataatgcagttagagagcagaataatagacatacgtagcatgaacaaacaaacaaaaaatagtacaaaaaagtacaccaacatcagatggaacaatattatcagtttaactgcatactgccttacattgttacgaccgagccagttagcacagtctagatcaattttctgtggtggaatactggcatcaataagaagaagtacgccaaccaaggtatctctgttcaagaagtaacccttggtaaatgaagaccagtccattcgagctgattgggatgca

SEQ ID NO: 8714 - DNA, 472 bp, Zea mays
tgcagatcgatattggtatccactggtgctgggactgagagcatctcgccaagagtcagaggagggctgggttcagcagcagcagcagcagcaccagtgcacatttccagagcaggcgcggggggtgccgccctctggaagaaatcctccagcgacaccaaggccagctccatcttctcaaacggctcggcatccaaaacgcggatcggcgacacgcctggcgcttctgcgcccaccgcctgcaggaacggcagcacctgctgctcttcgaccttgggttgttcgccggcgacgaagagatcgatcttgggaatcggaaccctcctcttcttgctggagtggtccgtcgtctccagcgcggaggccggaacacgaacgaccccgcgcctctgcaggatgtcgcacagggaggccacgacgctcctctggcgctcctccatctgcgccagcctgctctccagcgactgcatct

SEQ ID NO: 8715 - DNA, 457 bp, Zea mays
tgattgcacggtttacatttacatgccagtttaacctgaatgatggctgaacatcagcataaagcaaacacgatcatgacgagaagaggcattttgcatggctatcaaaagcaccaattgcattgacccgaaatatttgcaatctcctcaaaactacaatgtttgaagttaaactgaacttactgtgacgttacagtatttagttaataactgtctgctgggaaatacaaataatgaaaaatggaaacctcgcacgcacaagagcaaaaataagtataattcacaacaggtccaactttgatgtatcctccagcctatgtagcatcatgtttgctttgagctgtgacacaaatatccaagttagcgtatcctccagcctatctgcctatgcagtgcaaactcgtgtacaaaatcaacaatgagcacgtctgaattatacaacataatcagcaccggg

SEQ ID NO: 8716 - DNA, 517 bp, Zea mays
tgcttgagacaacgcatacaccattgtttttttattcttttcaaaaatcatcaatctatatttctaaactaaatttatgagagcaattcagttcaaatgtcagatcagatattatatcagactgagagcacaacacttgcctcggcccatgtctccatcgtgtaagaaaacccaggaggcttgtccgacgcgccaaaccccagcaaatcgatcgcgtagacggtataggattcagacaacaccccaatgttcctaccaagcgagttgatcaatgttcccagtaatggttggcgcatgcagaggcacaagctcgagcacatggcgtgcgtgcaccaacggtcgcgcgttgagcccaggtaaggtttcatcagaagattatgatcgatcaagggggcggacggacaaggccggctcacctgcgccagtgcgcgacggaggcgccgaagccgtggacgagcagtacgggcggcccctgtcctctggcgaggtagttcacgcgcatccctcgccacgtcca

SEQ ID NO: 8717 - DNA, 481 bp, Zea mays
tgttggattaaagatcgatggttgagattgtatatgtgcatcatgtgcacctctcctccgtgtgcacacggatacttcgcccgcgccatgtaccacaagaatactacagctctcttcaagacttcaaaactgctgcatgcatggtatggtaggcgcacggcagcataaatacctagaaaatggatagagtttatggtttcctttcacccaggtgatggtcatcccagaagaagttccagttccaggccaaaagcccaagaacatgcgtgtgtctgacccggcagagtgggctttaccatgtatgccgggtccagcatgcgagtgatatataaggagagaagagagttgagaggcaggcggcgagaacactgccgtgcttgtggctgccgccggcgcgccccgtggtcgtggccaggacagcctcgcagctcgcagcgccggccttgcgttgtatcatgatgctacttcccagcctgcttct

SEQ ID NO: 8718 - DNA, 552 bp, Zea mays
tagaggatccccctgccagacggtcgtcctccggacaccaccgccaccatcttcggcgacggacaagtacaaggtatactctctctctctcctcctgcgcgcgtgcgtgcgtgcgtgtgcatgctcccatcatgatcatcatcgtcttcgttgctattgttttcagcgacgttcgtgaatgagcaagacatgagcagggtggctatcaaagccgtgcaagacccccgcacactcaacaagaaattacacgtgtgccctccaaccaatctctgctccctcaaccaactcgtctcactctgggaggataaaatcggcaagcccctccacaggcactatgttgctgaagaagagttactcaagaaaatacaaggtactagttccgttgttctcgaatatttatcgctcctgttagtttatttttcaactaaaacatggtaatattgaaaaaaaaacggacttatattaaccaaataaatttccatgcaaattaaaactgttgttgtctgcgtgatgcgtgggtgtggcagagtctccgtttccactcaactttca

SEQ ID NO: 8719 - DNA, 550 bp, Zea mays
tgcccgaaggcaggaaatgagagtagaccggaatagtacccggttttctggaagaacgcgttgagctcgtcccatctacgcagcggcaggcagccctgcgagaaaccgaacatggctgacgcgttcttcacgaacggggcgcagggcgcctgctggcgagtgtcgccggtgccgtatatcagcatgtcttgcagagagccgcccagccggagcttcagaggagagaacgctgcgagttcgatgaggattgttatttacggtttgttcaatgattgttaccgtcacatcaaaaaagacgacggctaaagaagacctttaatttctcgattggatagtaggacgaaaacaatttccttatgaaagcgaaagggatggatggtggtcacccgacggcttacctttgacggcattcaccaggattttgttagagagattctgcaggtaggaaaaataccaaagacccagtgtcaatcaatgatcaatcgcagagctagtagccagcgaattgaaaagcagtaaacgcacggcacagggggatcctctagagtcg

SEQ ID NO: 8720 - DNA, 685 bp, Zea mays
ttataaactgaaaagataccggtcatgataggagctccctcaggtacttcctccagagtagtgaagttgagcttcccttgcctgacttgtaccttctgctttcttcccttgtcttgatttggtgctggcatctgcctctgctggttcctgggacaattcttggcatagtggcccactttgccacaagtgaaacacttgttcccattgccctggcagaactgctgctgctgctgcggaggctgattgttccttagggcgggagctggaaagcggttgggtgccggctgctgctgctgctgaggtggcctgatcacccatttgcctgcctgctgctgaaaacctctgctctgattgtgagaaacaatcctgaaacctctgggcctgagcggatggtgctgccattggtgcctttctcttcttctctgcccggtgagctacaatacagtcctcctgggagatggccaggttgaccaactcattgaagctatcagcccggacagtgttgagacgttcttgcagcttggtgttgagacccttgcggaagcggtctctcttcttctcgtcagaattagcatgatatcctgcatactggcacagatcattgaaggcctgggcgtactgcaataccgtgcgggttccttgattgagtgccagaaattcattcaactttcgatcaagaattcca

SEQ ID NO: 8721 - DNA, 462 bp, Zea mays
tgttcatcgatcatgtgggggcgattaggcaagccggattaagattaatgatggatgaggcagggcatttagaccactaatggccggagatatggtactctctactctgatcgcggcttcctgttggttgcgatgtgtcagtgacactgttcgttgatcatggtgtggttaggcgagccggattaagattagtgatggatgaggtagcgcatttagatcactaataataataatgctgagagagagagagagagagatggtactctgatcgcggcctcttgtcggctgcaatttttttcagcgcgctgttctgttcatgaggctgggggacttggattggcatcccattttgcgccacggagatgttggtggtgcaaccaccagaaaagctttggcctcattctgcagttaatggccccttcatttcggtaggttcttgatggcaaaggcacatatctcgtt

SEQ ID NO: 8722 - DNA, 445 bp, Zea mays
tgctggccgttgaaaagttttctgcaaattttgccacttccgcagaagaaatatctggtcgaaagtaaacatatatgaatatagatgatcgaataactgtggtgacggtatgtaggttcataagaaattaattggttgtaaaggtttacaagggagagggcaaatgacatcaagaatttaacacctaagtttttacactaggcaacacagaggtatgcttacggggaagaagagtcttttgtaactgtgcttcatattcaatcccaacaacaggttcctcacgaagaaaatgctgcaagaaaaatacaaattgcatcattgtgcttagaagctgtatagatggggatcctgaaatttcacttaagtagtcgacgaacatgtggagttgtggacttagtagaattcaatattattggtgtaaagtcgtttgaaaacagaaatttca

SEQ ID NO: 8723 - DNA, 1003 bp, Zea mays
cccctttggaatttgagataacaagggcccgacgacagagggcaccaaaggcgcgtatcagcttcaagcttatagtataacttgttttactcacctactttaatgcctgctttttactacttgaaattgaaagctggcttggctctcagaccaattaacttgacacctgcttagcgccctcactgctacttctctcattaagctgctctctccttttatcaacttatgaaaaaacagcctattgatcttccgtcgctcgctatggatggttgcagttgccaaaaggctaccttttcgcacaacacttaaatgagtcactgactggttttgacgtacgtaatacttaaccttacaatcggcattgcccttcttcttgcaacagaggattcgttctctacgccgaaaggactaagagctcttattccgcagcctttagcacataatggaattgctccttctatgcctcctcatctgtctcgcctgcaaatcctgctaacagcctagtctattaggaaacagtcattaccttcaatctctttcacctcgtgcattttcttcctatacacatgttgccaaatgtttcggagttccttcatccgaacaggcttgaggagatagtcacacgcaccatgatgtacacctttcatcactctacttgtctctccgtctatggacatcactgtggaaacagattggagcaatttggtaccttgataatagaaattgaaaacaagtaacttgcagaaagacatgtgttggtattgaatactgacttataacaggtagatccatctcaagcccaatgagttcgagaagcttgaaaccatccatgtcaggcatgttgacatcactgattacaatgtcaaacttgtttctcctctctcggagaatttggagagcaacgctagccaaaccgcatgtggtgactgtaggtaaagaaatattttagtataagacaggataattatcgatcataaatacatatgcatgcttataatataat

SEQ ID NO: 8724 - DNA, 1201 bp, Zea mays
aacgactttgtctttaggtataaggacaaactataggaggcaagcctgagatgtaccgggctccaactcaactttatgatttagacaaaaatacggaaacagctcactggattggagcagagtctggtacgctaggaaaaataatacttgagaaaactataatttgatttatcagatataaaatacacttgtcaactgcagtatctgtcgaggctctccccaccttttgttcagtctatctatatttctcaatgttcctgatcaggatgaatcgtaaatataataattatcttttctaccttatagtcttttttttttgttcgtgcattgctaacatgtcttccccggtcattgggcaaatgcagagactatcgggctcctgacaacatgcttgcctccaacttcgttccagctcaggaacccatagttcccaacgtagttgtagtcatttgagttccttttcaccttgctgacctgcaccgtgactgtgaacggctgcttgctgcccttgccgccgaaggacagcgccgtcggcgaaaccgtcaccttcatccctgccggcgccgtcacggacacactgtacttagccggtgcggccgcgacgtttgtgagtaccctcttgaacgtgtgcgtggccgagttggtcctgttgaggatgatcgtgaaggacgggtagttcaggtccaggtttgctccggcgcagctgaaaatatgggcagcaggaattgcaaagctaaaagtgcagcgtttttcttttagtaaaagcaacgtagaccggtgcaactaatgatatatatggatcaacactaccaaagtaaagagttgaccttgttgttgccaaaaacttgtgattgaagatttcttcaaaacttattctcttctctgcaaattcaaattatattaagcccaattttccaattggtaaaaattaaactgatcacagcgatgacttataatcaagcatgatcacaagaaacaagaaatgaacaaccacaactgctgcagaaaataattcgttaacacacgcctgctttgcacaagcaaaaagttaaagtgggacagcagacccacttggatcacggtgcaggagtcttctgcacaaatcaatgcaatcaggacataaatcagcttcaatttctgaagggaagttaagatcatcggtagccatgacattttggtgcaggggtaccgagtagacggc

SEQ ID NO: 8725 - DNA, 506 bp, Zea mays
tgcagaaattttttatgatggttcaatggaggaacccgaacatcctgatataaaggtatggatcactacaaaagttgacatatcactgcatggatttctttttgcatgtcatgtttgtttcaacttgatgcaattaggaagccatgttttctcaatagcttctaatgacacttcagagaaatccgccaaaggagtcatccccttttctcaaagaagaggtacatatctaactaatcatgggtgaaattttcctgtagcaactgacatatttatttttcttataaccttcttacctgtgaagcccatttttagtggtttgcctacaatgagttctgatgtcaatggagaaaatgtcatggataccaaatctgttctccctgtaacgccagaggttgatgctttacctcttttaggatgtggtttcaattcttattattaggagtaaaaattgtaagaatacttctcttaccttgtcaatttagcaggcgcctctttggtcaacagca

SEQ ID NO: 8726 - DNA, 440 bp, Zea mays
cgaaccctttctcggtacccctgagtactgtggttcctgcatccatcgcaaaggagggcaaaagacttgagacatcattagggcgcactgtagagaaatcgatcaaagctaatattgatgcgttttgggctcgtctccaggaggaaaacactaagcgtgaaaaggctgatagagagcgaatgcagcaactgtgtactctcattacaagctcaataaataaggacttaccttctaatctggagaagtcacttaagaaagaaatttcttcactcgggcctgttgttgctcgcgcaattacacctgttgttgagaagtccataacctctgttgtttctgattcagttcaggttagctaattccttttgtatttattatgcttaatttgatcatgcttcctaattgattattgttttttagaaaggggtgggtgacaaggtgtg

SEQ ID NO: 8727 - DNA, 484 bp, Zea mays
tgcacaccgccgccgccacacaggtcaagccctcttctctgtttccagacgccgcccctcaaaaccctacctatcccctaaggcatcgccccgccggcgccccgaggacaccctgccggcgcttcgccagcgccttacgccgtggcggacgccttactccacagcgcaaggcgagctagacaccttgccctgtgagcgcgctcgctaaggcgacgcttaatggacaccttgataagcatggataaagcattaaccatgtgtttttgttgccatcattaataaacatggtgatgaacaggcaaaagagaaaagtgaactagttgtcacaatatttctcattttgaccaaattagaaaatacgtgttgactccagttccatcacaagaccaaaagcgagtcaaaatcaacaatttagttaatgagctgtacatagctgaggaagtgacgattgaggattgacgaataccagtaaagaaatctttca

SEQ ID NO: 8728 - DNA, 479 bp, Zea mays
tgtgttagtggaggagatgtggtggcggcagctagacagcatcgtgagcgcggtgtcgtttgggctcatgtccatgttccttgccattgccatcctcgagcacttcctccgccccctggcccacacgctcgagcacgcgccgccccgggggatccgccaccgcctcctcctcttcctcagccgtggcggtgagcgcagcgccgcccccagtttagatcttgaggcggcgacgaagcttcaagcccacgcgcccctcgagatggggccgatgcggacgcggatccgaaactggaccatggggccgacggggtggccgcgtggtgggtgtgggtcgcgctcaccgtctgcgttgatgtcgtcggcgtcggtctcgcgctcgtcgggttcctctactgaacaaggtttctagggattccccggtttctaggaattccgtcgtcgcttggcgctgccctgttatcgtaggtgtcgccaggggg

SEQ ID NO: 8729 - DNA, 480 bp, Zea mays
tgctggtcacccattctgagaactgtgtgggcactggattcttgtcttgtccttttaaccattcttctttaatggaatgactcacagctctcctgcatattcaagttaacaattacgcatctcgtattttttaagcaacagttcacatcatgtattcgccctcactttgaacagttgattaaccctaaaccctcttatgtacgcccttagaacttcaagttgctaatttcttaactaatgaacatacttgagagcagttttctgccaccctctcagaagctcaggcttcatgtttcaaatccaccatgttttgttttatttgtttcgttgggatttgagcttctcacaacctcattgtatatatacctctttgctgttcagtgaaatgtacatcattacatatagcttatcatttctctaactaacatccgcgagtctttttttaatggattatatctcattagcttccttttttggcat

SEQ ID NO: 8730 - DNA, 1057 bp, Zea mays
tgccggcgacgagcaccgagttgttgacggcctggtagttgctgttggcgtaggcggtgatgaccacgttctcctccatctcctcctcctcctcctcctcgttgtcctggtggccatggccttcgtcgtgctcctccgcgtccacgctgccgacgacgacgaggtcctccacgtcgcccgcggccgccgcctccatggtggcgccgctgttcttcccggccagcgtgatgacggtgccggcgttctcactgccgctgccgctgccggtgagggcggtggcgaggtggtcgttgagcttggccacggcgctgctcacctcgctggccacggcgacgttgtcgttggacgccattgattggtagcgagctagctgtttcttcttcttgcgatcgagtttggtagaatgtgtatcgcaaaatgatgatcgggatgtgcagtggtgctcgatgaactgaaaggctagctagccttgaccagcaggatgcacatatatatatgtggatggtgcttggtgagttcagtcacacttataatgtttgcttggcaattccattcattattcttgtgttagacgtgttttactcattcatcccaagtttagcataaaatgttctgcctcaattcctttagctactaaaagttctcactacatgtagggagacagtagagaactacttggtgattggttattctttttggtcatattgtatttctgtgaagaatagctcacaattgattgtcttcctaccaaaatgcaagcctactaaccggttctgcatttcttgcacttccaggtactgaagcaccaaaaggttattgaggaactgcaggaggaaaacgaaaatctgcgtcagattctgatagaggaacttaagatttcaccaaccaaattacaaataggtcataaaaatggagtgaaggcctactatccatgctcggactgctttgaatgtcgccgcagaagtcggagaacaaccagatagcagtgggcattgccgttctttggttgagcaaaattttggtcgtttgttcagtagcttacaggggcgggggtaag

SEQ ID NO: 8731 - DNA, 966 bp, Zea mays
ttgaaatgatgccataatctagactgtttgcagtagcaaattcagcaaatgttgcagaatacctcttgaatccagtcatccaagtgatggattcctcatctatatcaatctcagcagtggctaggaattgttttacaaccatctcactgaaatcggtcctctgacccataaagtaatagagaccacatgcctcaaattttggaattaggtcctccataactgattgtcccaacataaaagtccaatctatcacttgatgcttgtggaagttggtatccatcagtgtgccccaaaagacatcaaattggagctgaatgtgaaagaattgaatattggtgtctgagggcagagcatattgattgacagtcctcctggagcaatattctgccatagagaacctcctctttggataagtccatcctgtgatgtcaattgggtagtcaggatgtgtatgcggaatgtcttctgtgtccatagagacactacccccactggccctcgtgtgccgctggaaggccggcgacatgcaccagctccgccaagcgtactgcaaggacggggcctgcaagcccaacgagaggaagcacatgacggctgtcatcctgctgctccacctcaactgctttgctcagtacgcgctctgtggcctcaaccttggctaccggaggccccggcgtccggtggtcggtgtcgccctcaccgtagcggtcgccatctgcgcgccggccgtcgctgggatgtacaacaacctcagtcctctcgggagagactacgaggcgccggcgccggcggaggggatgataataagtgaggaagagtcgcagctccagcgcaaaacgcccgacaccgagaggcgctactcgttggtgccacggcaaggacaaggagaagaaccgcagtgggtcggcgggctgtgggaggacctgtgggacgacatgtcgctggcgtacctgtcgctgttctgca

SEQ ID NO: 8732 - DNA, 522 bp, Zea mays
tggctagcaacgctgcttactgatgatcttgatgcgctcgtgagtgcaggtgatggtggtggcatggcgggaacagttgtgttcgcttccctgcgcgcggcattcagagcttctgattagacaatgcaagcaaactgggattgaccacttgtgtgatacaggactactacaagggaaggtgaaataaaaataaaaaaatccttattgtcttaacctggtgcatatgagacgccctttacaggtaaaccatatcttacacgatggggccgccacctccgtcagtctgagcgccgtcttggatttcagtgatttcattttcctgcgacagagggggaaagaaaccttttttttgtaaactacaaagacagcaccgcaggcccgcagccatcatgtatgtagtccgtacttggagtagtgtttgtctgctgctgctcccataacaagcttagcgacgccatggagagtgatgagctgctcaagccctcgtacagcatcatccatttcgattacaactttctggca

SEQ ID NO: 8733 - DNA, 902 bp, Zea mays
tgccggccgaagaggtcctcgacgatgtcgaagctcaccaccgggttggaagcggcgatcttcatggacaggaactgcaagcaggggagggagacactccggtgagccgtgagcgattgcccaacgacactagcttatcaagccggaagaagcggagaagatgaagcaggcagacagacacagacaggccggtcggtcggtacctcgacttgcttctgcagggactgcacgtagttgatgatctcgtcgagcatgccggccttgcccgtgaccttgctgcacccgggcaccagctcctgcaggtaccgcatccgctcgctgatcctctccctcctcacctgtacgtcagttcgttcggccatgagctctaatgcacgccgcaggtcgggtcgatctatcggtgcccacgagcagcatggaccatggggcacgcgcgcaaagatgtttgcccagtaactctggtcttgcaagcaatactgaggtaatgttgttttcctatgtaaacaagccactgtgtatatttattttatagctgtttatacttagcatacatttttatgtttctgcttgtctctatattgcaagaatgccaatgcctttgaaatgtgctaaccttctggatatagtacattatttgatattggtttatgatttcctacttatgatagtgcaactctagctataactatgtggcaaaagccatacagttcaactagcaaagatttcttgcacgatctcgacaatactcactaaagtaacaaaagtgacatgataccatactccacttatgtggtatggctagtgtgatagtgatgtagattattgattgtttgatgggatagcagatagatttgtggctcgccctccgttggaagatctgagctgcacttatctgatctagc

SEQ ID NO: 8734 - DNA, 470 bp, Zea mays
tggagatgaggaattagctatcttcctgaagaatgatgatatactggccaaggaggcaaagttgaaggtttagttttagcaatcattgctattctaattcatttcttgttaccatgtgttggtaccatttcttcaagtgattcaattgttggttgcagataaaacgagtcgatccaacattagacatggaggcagacactggagatgattacattcatcttccggtatgatttttttctgcaattatcttatatttttaaaacaaatgtggtctctagattttctcatactgatcatatttgcttgctgtttataatgaagtgcttatcctatgttgaaactactgctcaatcattatgtgtttggaccctcaggaccatgggattcaccgtgatggtagcaaagagacagtcgatgctgacagtgagttggcgaggaggacgctgtctcaggacctgaaccgtcatgca

SEQ ID NO: 8735 - DNA, 502 bp, Zea mays
  unsure (1)..(502): unsure at all n locations
tgctgaatccgccggtgttgctggagtagagatgccccggagggaagatctcgaagtgctcacactcgtcgtgcagggccttcatctccgacgaaatccacaccgaccctgcccagcacccagattgttatgatattgttcagcttctattccattcatcagagagagagagagggagacggttgttaccatcgactccccatccgatgtagaggggcgtcacaccgatggcgtcgcgagcagccatgaagaagctgctgcccgcgcggtcgccatggcgagtgtccagcagcacgaaggagaagacgccgtccagcatgtccacgaactcttctccatgctcctcgtactacacatgcatcgcaattcgcacccggnnggggaaaaaagttgacgatgctgagcagaggaatgaatcgaaacagtggtaaactagtaggtgctgtgctggtgagtggtgaccgatcgacagacatgacatcaaatgacccagcacatgaca

SEQ ID NO: 8736 - DNA, 501 bp, Zea mays
tgcaaaagatgaggggagttttagaacataatagcacacaaaatggcacaaccatggtatgatagtattaagaaaaagtgtagaatgatcatacaaagaagtatcataaagattggttttgaggatactgtcatcatctacaatgaggatttacacatcaagatatcgcccatggattttaagttgacttgaaacagttttggttatgtacttcaccatctaagatttttgcatcatctatggacattaggtcgaaaattctctaaatactagacacggttgtacacatacttccaacacagatgaaacttggttcaaacctataaacatatactgtaaccttacaagaaaatataattgagtaaaagtgtgaagttcagtataacacctaacaatgctatgcaagaatgcttcagtattgaaattatataagatgacatggaaacagcttgtgttgttgatgaaaagttccaatgtgtcaatttgttagggtgcatttca

SEQ ID NO: 8737 - DNA, 556 bp, Zea mays
tgacacatttaattcatatggagagattgttgctccatctgttttgccttttcagcggaattgactctttgcctgtttgatttatatggcttcacattggttaattcctagcctaggatttatgttgtgtttatatatatatttgttcaaattaagagttggtaatagtttttaccaggaatcaaattttattacatgtatgtgttcagacttcagacgcatctaaatccattgtgacattgcacctagacagctagccaacattttttttcttgtcctggtttatatgttagtctagtggattgtccagttacctggtttgctatgtttggttgtctgttgtattatggtagattctgattccatattttgttgtgcacaacagggtgatgcagacagctccttggacaagcaggctgtggcagaagaagaagactgatatcaagcagtagattttacatctagtttaccaagaattggacactgccttagctatgttttgaattcatgtcactatatgcaatgttgtatttcaggggtaccgagaaaggttagt

SEQ ID NO: 8738 - DNA, 988 bp, Zea mays
tgacggtgtctgacgcggaggaggaggagcccgtggagctcgagcccggcgccttcgtccccgttgacctccgccgccccaatcccaacggcctcgagtttgacaacctctacctcgacatgaatggtatcatccacccatgcttccaccccgagggccgggtacgcattcgatcctgctcgttcgattccgcaccaccggaaccgctacccagtgtttgcttagcactggatctcacggcttcgggtttcctccttgcagccggcgcccaccacctacgacgaggtgttcaagtcgatttttgattacatcgaccacctcttcggcctcatccgccccaggaagcttctctacatggccattggtgagtcgctgccatagttgcgctatttgtcacgtagatctctgagtaacaaggcctgttcattttttgttgttgttgttgtcatgtagatggtgttgctccaagggcaaaaatgaaccagcagaggtccaggcgattccgggctgctaaggacgcggctgatgcggtaaggctactgtttccactggaaaatgcactaaggaaagacaacaactcagactcaagttatatgcacaaccaacaatgaataatagttttgtgtcagtttaaggatgtcatgataatagttgtagcagaacaagttaaccaagagaaactgcttccaattattaaatattcatgcaccacataaaaccaatttgttcttgttggaaacctttggaagcggcaataaccaaaaactgtcgacaccatggatgattcagtagcactacgcataattaaagttggaacagctttgtaaaataaactgagaagtaggaccacttttatgctaacgagaagaaaaaaaggctaaaaataatgtaataaagatgtctacagaatcaaagaaatataagaacatctgtatttagatgcttgctccacgtcacatgcgaggctgaattagaaaatttagatgca

SEQ ID NO: 8739 - DNA, 1345 bp, Zea mays
tctcatgggttgaactgggttggatgaagcgagctcttggattcgcaggcctctacgttggttgcgggttaccaagtaggcctccatcaacttctggacgtgctcatccttgacttgctttagggcttcaacagcaatggcttcatgactttccaaggcagctacatgggcttgagctgaggtgagatccacatggagcttatggttgagcttctctgcatcttctgctcgggcaatcatctgacggtggtgccgagccaagaaatcatactgtgcatccagggtgagcaggtatgcagtgaggtacacgactgtggggtcgtcctcaagcagctgctgcccttccaatgcacgcatcctggccatccaaactggacggtctctctgaaagggcggaaagaatctgagcggggtgtcggccacttcttcttcatagatctgacacagggccctcaatgccttgcgagcgacgacttggcaggtgtctttgaatctgtgcccagcagcagtgacactccattccacatggtgtggactggatccaatatatacagtcacgacacacttctctgtgccatgctcgacgaattcacgaccatcatactctggctgactcctgattccgaggcgaactgtgcatgctctcagcaacttggggaaaccatcttcattctggcaaaagctggattggcagcggacctccatctgacttctgagagaaggaaagggggaaaacatttttgaaatgaagggatgagagcaagattttttttaagaaaatagttttgactcaaaaacttttgatcaggctaagggttacgtcctgcggccaacctaacagctctgataccacttgaggcatcagcacaggaagaaaccctggtttgtgcttgttccatattcaacaatcaacagtctgccatgtgtattttgatgaatttgattagttaatttctagtatgttttcagcttggctttgctatatgggagccaccccatgggccttacaaaacaatgaactatccttggaggagcttcaccaaagttagtggagcattgaggcactgttcctttgcagtaatggcattacatggttgcattctttcagaaattcaggtttgtccatttaatgtcaacaacgaactgttgagattcttattttttttttctaaacaaatatattatggacatacattaggcaccaccagaaagcagaagagtattttctgcagagattcaaagagtgggacaggaaggagctaaagtattgcgcgagctcggaagcagagttaagacaatgaccaagctgagttcttcaggtattctgttcgaagtgcacatggca

SEQ ID NO: 8740 - DNA, 572 bp, Zea mays
tgcgtgatgtcgtcgaacgttcctgcgtcggttccttcgtcggcgggattctcgctgaggtggttcttctccaggcgcggtcggttcatcgtcggagacggcgggcgactctgctctcccgatgaagaggacgtcggggtagagcggtatcgctgccgtggcgactttctttccgttctcctttgaggtcggaggaacgggaagaacgactggcctctccttgatctccttccttctcatgatctgtgtccattctttcgtcggggaagtaggcagcggagtcttccgggtcagcgagcttctagctccagcctccccggagacgatcttgttccgaagagccggaggtagcgtttttccagcattttcggagtttgttggaggagacttctgttccggtagatccgcgaggcggtgtagaattccctcttcgtccgccacggatgagattgtcccgaagcagaatgtggatccgggacgcatggtaatcttgctgtggaaggtgacggccattgagctagcttggatcgtcgacacaccccctacctggcgcgccagggggatcctctaga

SEQ ID NO: 8741 - DNA, 537 bp, Zea mays
tctagaggatccccctgacaatctatgtatctagtagcacggtagttctctgagtttgtgctggttcctctcgagagggtgattatagatatataggggatattcagaggggaaatgaaattaattaatgaaccagagcactacatttgtaaaaaggaaagaaaaaggaaacagtatagttttaacatgcatggccccctctctctctctctctatatatatatatatatatataatatgtatctcgttttgtaaagaattaatcatggccatcggtaaataaccctacctaccgatccaacgctagctacagtacccctgctgtgtctgtgtgctgttccggccagccagcggagagctagcgatcggcaactctgacagccaaagaagatgccatacatgacctctctaagccgcattagctgtgggcccgacacggtctcgatcgtcgagcagcgtgaggcagcttcgagctctcacgttgagcgtgaggcgcaggcgcagctacttcgttcgccgccgttggatgcagacgca

SEQ ID NO: 8742 - DNA, 494 bp, Zea mays
tgatctagcttcttcctgcacaaatcaaaaggccagattgattgtttgaccatgtcttagaaaatttgcactttcggggcaagcaaataaaatccaatcatatacacaaaaaagaggatgttttcccctatgtcattgcgatgcagagtacaattagaacagacaaacagaaccataagtgataaaatatcttgtggataagtatcacaatttggaaggcgcataagcactagtaaaagtagatctgatagaatcaaagatacaaaatgtggttgacaaaaaaattgatgaccactattaaagcgtcaccattgagatagataataaaatgctgattcgctacagaaataaacctacaagttccccatatttggcactatatgaacaaaacacactctatttctagctctgtaatttcacattaaacagctcaatctggaaaggggggcaaaaagtggtgttcagcgatggacagaatgatgggacacatagca

SEQ ID NO: 8743 - DNA, 476 bp, Zea mays
ctgctttgctagcatcatgttcgcccacgtaaacgaaaacgacgcgggcagcaggcgccagtccgtcgccatcaagctaagtgcgtgcgtgctttttcccctcgtgatgctatagctagtagattgctacgaactccggagcgacgtggagctgcagagagtgaggttttgtgtgtatgtgtgtgtgagagagagagaaagaaagagacagagagcagttacatacgttgatggcgcccctgacgccggcctcctccagcgcttcgcggcacgccgcctcgtgcacgtcctcgtcgtcctcccacccgccctgccagcgccagaggaggaagacgaccgatgtggtcagtgagacgctgctcgcgtgcatccccgtgaggctgcggctgcgactgcaactgctagttagcacactactagttatattaccttggggaagacgaggtcgtccctgttgggcgtggacaccatgagca

SEQ ID NO: 8744 - DNA, 922 bp, Zea mays
tggaggggcgcggcggcggcggcggcggcggggatgaactgcgcggcggcgaagtccgcgccctcgtcgtcgtcggtgatgagcagcgatatccgcttgctgagctcggcgaagaacacgtcgtcgtccagcatcgtctccacctccattatctcggccttcttcactggcgctgcgtgctaagcctctccgaatctgtgctgtgctgcgctgaggtggcggcggcgagggcgagctcggagagctgcggcagcaaatggaggagagtggagaggagaggagcagcacgcagcagaggctttgcttgcgttatgtcgccgccgtggcctctggctggcgctttaatagcgaggcccccttttctggtgtcaccagttcgagggctgggcgtggggcccggcacactgctgagactggaagacattggtgtagtccaatgtggctctacaaggcagtccctgtgtgtcagatttatgattccatccgtatagctggttgccagaaatgtgacaaccaccgcaacagagcactgtaaaagcaaagctgaccttcttcttcttcacgggcttcaggatcttaatgacgcatctctcatcgctcccggcccggaacccttcgaacacctcgctgtactttcccctccccaccttccgcagcacctcgtacccatcctgcttcctgcagggacagacgcatcagaaataaaaccttacaccattcaaatctggggatcacagtgtaaagccgagctccagctccgtgtgcctacccccactggatgtcgagcgactcgtagtcccagtactccttggggcgctgggcgttggcgtcggcgtagacgcgcgccaccgaggcggcgccaccgggttgccgcgtggcccgcccgaagcgcggcgtcatggggagcggcgcctcagccgca

SEQ ID NO: 8745 - DNA, 494 bp, Zea mays
tgttggaattgacatcagagaagacgattgaggaactttctcaatggtgaccttgcaatgctcgttcctgccaatgattgggtatgccaaatgatttccggtggctgtagaaggtgatgttgagcaagaaggaatttcctccgttagtacagattgtgtagcacctggagtcatcagttgggttccagctttggacaaaacgttggttgatgaaatatgtggatagacaacatctgacacatctgcaagcacaaattgtttctgtggaggcttctgctgttcttgcttcattggtggtggcgcctgtgatgcttgcagcgaaacatcgctatcttgttgaggcaggatccgctgctgggcaagtgaatgagagcttgatagctgctgcatgtccaaaagtaacttctgttgttcctgtattacctgtaacggcgagagtgtaactgttggctgtgatacaagtgactgctgctgtagtttctgtaatagctgca

SEQ ID NO: 8746 - DNA, 516 bp, Zea mays
tgcctttctaatgtcaaagttctgctccttgcgctctccctaaacaagcacgaagtatcaagcacaaaagtctatatctagaacaaagcatatgatttaaaaccatcagatgccagccagatataagttacctggacatagatatcgaaaaccctcctccctcagcttctccaagactgcatgtctggaaagtcaacctctgcaaattgaagtgtgaccgtgtaatttccattctcaagtccaatgccatagtatctcagggatgatggtgacatccttgctgtttggaacagtgcagagtctagggtgttctcgaactggcgtgaactgtagatgatgtaacttgcattgggtgcatctgcgtccaagaataacccaacgctgctaacggcccatgtaggtgcacccgcaacatagtatgatgcagcactaaggttggcattatcagcttgatagacagaattatctgaacctgatattgctctactaccaccacagtccaccgcaaaggacgca

SEQ ID NO: 8747 - DNA, 486 bp, Zea mays
tgcgaagcaatctcaggttgttggccatgatcgatattattcctcagatcagttgtggaactttctccccgtccatgacttccgaatttattagctggcctatctttagaaggaccatggtaactgtttcttgaagaatcacttttcctatgtacatgatcgctaattgaatcaccaagcttttcagctttgctaaattcagttaactgtggatgtgccagaccaagaattgtacccttgatgggcacatttggtagtctctgcaccgcaggagaaacacaggaaacagaaactgccgggtcagatttgcatgccatacccatgacatcattagatggaacatcagtgcttttttgatgcttcttgaattccttggacgaagctgattctgggagattacgtgcatcaacatttctggctttgttgttcaaactctcaattttctctattaaagctgcattcttcttaattacaggatgcagtgca

SEQ ID NO: 8748 - DNA, 510 bp, Zea mays
tgagtggaccatgcctgttcgcagtttttcagtggatctcacgtttttactcttacccttgtttgatctggtcgtgggcatggacaggctgcaacgatatagtcctatgccagtgaactggtctaacaaatggatgatcattccctatcaaggagcaactaggtgtttacaaggtgttcacccttctgttcccacaggagcaatagtggagctgtggttactctcggccacctcccagcagaaccgtttccctgacagcaagatgccaacaatcaatactcaggtgcaggatattccttcccagtttttggatatttttgaggatccagttgggttgcctccaagcaggccgggtgatcacaatatccctctgttactcggtgcacatatgtttactgtgtgcctctatcagtacacaccggctctcaaagatcatgatacgcaagcacaagagttgttgactcaattggccatcgtctcagcatatcccaattcacctttcactatgca

SEQ ID NO: 8749 - DNA, 486 bp, Zea mays
gagtgaagaagcctcaccgttaccgcccagggactgttgctcttcggtaggtggaagacaagtatcttcagttgatactctagatcttttggttgaagacattgtgcaaacagttagcccataactcctttccagtgagatccgcaagtaccagaagagcactgagttgctgattaggaagctgccgttccagaggcttgtcagggagattgctcaggatttcaaggtaggtgaaagcactgaaacctcacatgcgggaattatgggatatcctccatggaatggaaggtttgtagactttgtttgagagcatgttcttatatacgtctcctgtgactgccgtgtgccgtgcagacggatctgcgcttccagagccatgccgtgcttgctttgcaggaggcagcagaggcctacctggttggtctcttcgaagataccaatctgtgcgcgatccatgccaagcgcgtgaccatcatgcccaaggac

SEQ ID NO: 8750 - DNA, 490 bp, Zea mays
tgctccccctattagtccttctcactgcgttcttccaagtgtctcccggtccttctggacgcgacagcacaccacctctacgaagcatctcgaactctcggtgccgctcaatttgtacccccaatccccttccacacaccgcctcgccacatcgcagagccagatcaagggaagacgacgcagatctcgccacgcgaacacagttagatcgagggagtaagtgagagtgagagccatgacggagctgttcgacacggccgtgaccagcctcctccacctgccggaggtgctggaccgcctctccgccgcagacggcgaccggcggtcggccggcaaccacgcggcgcacgggcacggccacggacgcgtccacgggctcggcggcggcggcggagcgccggtggacatcgtggagagcccccgcgagtacgccttcgtgctcgacgtgcccggcctctccaagtcagacatccaggtaccgcacctgcca

SEQ ID NO: 8751 - DNA, 509 bp, Zea mays
cgtgcgcttggatttaggtggaagcaaagaaggctgttcccagggacgaccacagtattgtgagcaagagcaacggcagcagcatagggtcacctggaccgggacgcaccaggaagatctttgttggaggcctgccctcgaacgtcacggaggctgacttcagaaggtactttgagcagtttggcatcatcaccgatgtggtcgtgatgtacgaccacaacacgcagaggccgaggggctttggattcatcacctacgattcagaagacgccgtggacaaagccttgcacaagagcttccatgagctcaatggtaaaatggttgaggtcaagagggctgttccaaaggagcagtcgcctggacccgtcgtacgctcacctgtgggagtggggcagaactatgctatgaacagggttcatagcttcctcaatggcttcaaccagggttacaatccgaaccccataggaggttacggcatgagggtggatggaaggtatggcttgctttca

SEQ ID NO: 8752 - DNA, 1021 bp, Zea mays
taccccttaagagagaatagtaaacaaaaggtgtatcttgaagaagttcaggatgagccagtgggacaagattcaacaagtgatgctaatgtagcagaacaagttgagacgtctatggcaagagaatcaccaccacaaccacgaaggtcagcaaggcttcgcgaggcacgaggagaagtgctattgttgggcaatggggaagtgttgttgttagacaacgacgaacctgcaacatattcagaagcgatgatggacccagattccgagaaatggcatgtcgccatgagatccgagatagattccatgggagaaaatcaagtttggaacttggttgacccgcctgatggtgttagacctatagaatgcaaatggatctataagaagaagaaagacatggatggaaatgttcacatctataaggctcgacttgttgcaaagggttttcgacaagttcaaggagttgactatgacgagacattctcgccagtagcgatgcttaaatctattcggatctgctatgccgcccaccagtcgcctacagtagcatttcggggggctctccgaggatacatacgtaacgtactacaatgacatgcagctctcgtcctgtcaactcaaacacgactgcacatcgcatgagacgaagcagccagcctgacgccggggctgttgcggatcatgctgccacagcggcgacatccaacaaaccaagctgggcagctacagcggcaagtacaggccgacgagctcagatctggtcgacccaccgacccgtctaccgttccatcgtccctccccgccccacgcgaaccgatcgagcgtcgacctcaccgcctgccactgccagtactgccgtcgctgttccacgaacgtgcgcgttgccggccgcctctcgatcggaattccaagctgccgctagctctgctggtcagccgatcgcgttgtcgcatcctagctactagcctagcccggtcggtcgtttaccttcgcaaaaacgtcgcctgcgcacgtcccgtttccg

SEQ ID NO: 8753 - DNA, 491 bp, Zea mays
tgacattgtagactataaaatatatacaatctctggtcagctactcacctggattctgtttgttgactgttggttgcacaagtgctcttgcaagaatgaacccaaaaaaaaatcaggggtcaaatatctctctgccctggatacacttgtacagaaagagaagggaagaaaaagataagagcaatcctggattccatattctgttttataggttcccaaaaggccactgttgtttcataaagaagggcactttctcatcttcttaaccagaaatgaaatgaccgaggagaaggttattccttttgggtacactcaagagataccaacatcatccatgctggagctccaatgtgattctcacaagtcacaacaagggccaaagtaagtatatagcagcattcattatgccacggtgcaaaaacacaccattcaaaaggtaaacaattttctccaacacaagtatatactcttgtacaatagcctgtccaaca

SEQ ID NO: 8754 - DNA, 517 bp, Zea mays
tgatgatccagcaactaatcatgattacatgactgtactgtcagtaaaaggtatccttccttgcttatttaataaaccattctgtctaaatttgcacggggtactacttatggaaatatctgtctcaatactttttcttgctattctgatgttcagcggctagtgttgcttctcaatggttggaattactgcatcaggacatcaggggacgtcttgctggtataattctgaaatctgatgtaaatttgaatgttgtactcatgcattgtactcaatgcatttcttttgtttttcttgaagctttaaagcgcagcaggaagagagtcagaaatgctcttcatacagaattgccttacctaaccgcgacagaattttcatctaaccaagagaacgaatcatccattgcaaatacgtgtgatgctggatatactgaaaaagcagtttcagaagcgcatgtggcacgatggaggtctctgtttgtccagatggacaaaacacttcaggaggaagggaaaca

SEQ ID NO: 8755 - DNA, 477 bp, Zea mays
tgtttcgattcgtggcatcgatggtctgcgcaattgggcccattggaccgtaggcaagcaaatctttttgtaaatctttttttgttccctgtatttaatgaaacatgactagaagaaatgctttggaaaaatggctcctggttgagatgctttgaattcttttttttttttgaggttgctctcgcttcttgcgacacgtcgtcgcggtctctatggtctatggaagccgtgggacagaccgagtacacagagcgttgcgggtttggttccaggacgggagcgtgcaggccagcgagtctcgactctcgagcgatgcgggcagggtagggcatctacccggtgtttgactaggtaagcgtgttgttaatgcgcctcgtggagtggacagtggaagatgggcgccaccacgacgacaacttgcaccgttgcacggagtagcctctatctgtgcctcgtgatctcatcccaccatcacca

SEQ ID NO: 8756 - DNA, 541 bp, Zea mays
tgctattgatccttggatggacacgtagtagctggcgtggcacagatagcttggggccgaatgcacccccctgcaccttctcgatctcagcctttgtgtggggagggtagcaaccttctgtgtgcaggccacgtaaatatttggtgttgttcagccatagttgatgttgcgcgcatacactgctcactctctgtcattatcccagccatccttatctccaaaccacgttagaccttgttcggttattcccaatacacatggattggatgggattgaaaaaaattcttaagaagtttgacttgtttgggattcatacccatccaatctcactcaatccacatggattgagagctaaccgaacaagcctatctgttccttatgctgtgctccctggaagcctctcccatacgtctccatctcctggccgttagcctcctcctgtgaatgctactcttctcacttgcccaacacgttcattcttaggcgcactttcctgctccatatcacttgcagccgcttgcacgtagccaccgaagcggca

SEQ ID NO: 8757 - DNA, 461 bp, Zea mays
tgccatcgccaagcatagacaaaaacgaatccaagaaatgaaaatatctcgcgacatcaaatcctttccgcgtcgctggaaatattccatgtataacgtaacgtttcctcatttaccgcgcaatgttactgatccccatctgttcacagagagcagtaactcaacttatcttcacatctagcaatagaaatccaaaaaaaacttaaaatttacagcataatttcacatattattaatgttatgagattccggcacgggcgaaaagcgagagcaaaatgggaagataacaaagtaacatgggcgaagcaacggagaaggtcctaccttgtcgagcttctcgaaagactcggcgcggcgtggcacccatccgcgcacggcctccggagcgacggcgacgagccaaggcggccaccccacggccacctgctccgcctcaaccgccctcggcacggggctcctca

SEQ ID NO: 8758 - DNA, 494 bp, Zea mays
tgagtactccaggtaagtcgtttggacatggtttgtttatttaagtcaaatttataaaactttgactacatataaccattttgttatttagttttcaaacctagtaagagtttattttttattttaactaaagaacaatgatcaaagctattatattttaaagacggtgtcattgtcctaacatctaattgacttgtaatttggacttaaataaaggacctgtcgtaatttggacttgaagctagggtgtaggtgtactgtttgttattgacctttttgttgctatagatgcatgcatgtctatactgtatagtagttagtactaccacgtatatatatatatatatatggccgtaccgtacgtacgcgtaccttgaggaagacagcgtctgccgacgaaacgctctcgaacatgtcaccggcgacatacttcacggcggtatcagcaggagcgccggcgacgacgttcgggagatctagcacgctgcactcca

SEQ ID NO: 8759 - DNA, 472 bp, Zea mays
aaaacatgacggcttcaattacgttgcaagataaggtggaccttagattgaaggattgaaataaagaacgacgggtaaataaagatagtttctttcacaacctcctcaaacttttttttcaatataatgttgccatgcatgcacgaaacatccattgcaagctaacccctccctataaatacaccccggtaccttcattctccgggacaggaccgcatgcatatatccctgcctgcaccacagaccacactactactgcactaggccggacatccaaactaatataacttgcaagctaagcgcgtgttccctacgacgaccgatagagctagagctgcaggaagaggcagaccgcagatggggaggtccccgtgctgctgccacgacgccggcgtgaagaagggcccatggacggaggaggaggaccgcaccctggtggagcacatcaaaaggcacggcgggcacgtcagca

SEQ ID NO: 8760 - DNA, 530 bp, Zea mays
ttgagtctgtttcttctgcttgtcttgcctcaagctttcctgaatcagtacagattgtctgcactgaaattggatgccttgttccttcccattggttggattgaattcaacagggagtctgaaggccttgtttggatgttgaagcacgtggtattaagaatttatagctctagaaccattgatgtgcagaactgtgatttgaagaaaaaaaacaggtctaagaaagactctactttttagcaacaccatggtattcaaaaccaaaaggtttgatccaaacacttgaagccactctccagtctccaatcaaaacatttcacaaaaccatggtatctttttttttaaaaaaaacttttcattcaaacagaagcagggccttggttgttttgggagcatcatcattcatccccttagtcaccaatatgaaatctgaatgaatgatttgatttcctgcaacaagggatgtgaaaaaggagtatcgaaacaactgtattagcattgcaagataatttttttcttgtagccctgca

SEQ ID NO: 8761 - DNA, 528 bp, Zea mays
tgacgggccacgagatctcaaatctcatcaatcgtgatcatcccgttccaatatcccataggcaaagccttccagtcgcttctccctgcgaccctgcccaaccgaagcacggcagtttctgcacccgccacgcgtccgcctgccctcccggccataaaccacgtgtgcgtcgaggtggccctcgcctccccggcccgctcctattatatcctcctcatcgtcgagcaccccctcaacccacgcaccaactctcgccattgccagtcaagctcgctataagcagccagatattcaggaccaccgatcacgatcccaaaaacagcggctctgtgtcgcgacgtcgacggcgatggacgctccggccatgttcgcgcgcaagcaagtccccgatgacttcggcctccggaacatcggcgaaggtgagttattattaagctacgaccccgccggccaacccagtcgatcgctagtatgcactaagaactacgcgtcctctctctcaccttactctgtgatgccgcgcgtgca

SEQ ID NO: 8762 - DNA, 488 bp, Zea mays
tgcagcggcgccaagaagcagagctgctcgctgcgtcaggggcggcagcagaggaggcgcctccgcgtcgcccgcgccgtcgaggtggacgcgccttccgccggcgcgccggagccggaggaggcggaggagccgtccgtcgacttcgcgttcgtcagcgtgagttcctgtcgcgactcctcttttttttttcttttggaatcgccgagatagagcgggcattgcgcgcgcacgacgtgcgcgcgctcgtgaccggcggtcgacttggagcttggaggccgccgcttgaactggtgcgcgcttgcgcttgtgatgttgcagtcgcggctgctgccggacgggacaccggacgtgcactaccggacggcgcgcggcgggcagaagctcagggacatcatgctcgacggctacatcgacctatacgggccctacgtgagtcactgcacgcgcgcggcgccatggccacctgtctttcttttcttgcatca

SEQ ID NO: 8763 - DNA, 1037 bp, Zea mays
tgctgcttctggcatcgcaacacctggaggctgagggggcacccagcggcgctgaggcggcggcggtctctcctcaactccagtgttgtaagtcaaaggcctaggttcatccgcttgaaaatcaggggcctttccattctggtgataggaaggagcatagctgtcctgggcatcagagtatgatccttcctcactcaactgggagttggatccataaccaggcctctgttgtgaatactgctgcatctcccatggctgcaatttttttaagggggaaaaacacaaacacatgaaaacccgttcaactcaaagacatcattgtatcagaaatgcaacagacaagggcctcctctcaccttactgccagaagacctatccgcttcgttgtgcagtggacatcggctgctaaaaaaggcacacagatacaatcaggctagtagttcaagttatagtaggccacattagttaaatggaagacaacaaaactgagtcgctgggaccgtctgggacagtctcgccccgtcttgatgcgccgcccgctgtggcaaccaaagtaacaaccttgaaagtataccgcagacggcagagtgattgtccacgagttttggcaccttcagtggatcaccacattgaattaattccggacctgggatctgatgatgcccccattcagtcctttgtggcttccgttacagagaaggtggagtgtctgctgcctccgccggtgccacagagacgacagtcggctaggctgatgcctcctgattttattccccgacgcagttgtcgcttggcaaaacaaaaaaagttcaacacttccggaaggcagattcaagtggacatcatgaaaaggctgaaaattgtgtcggatcagcaggctcttggctgggaaaccctggaagaatatggaagattgttcagcagtagaccttcggattctcacataaaggcgctggctgctttgttcgggtggactgtcccggatgacccagctccggatgctgaattgcccgctatatctgggttttctccagggg

SEQ ID NO: 8764 - DNA, 455 bp, Zea mays
tgatctaatcatttgagccaggcgaggaaccaatagatcaagtgaattcttgtcaacaacttttatacagatatcaagagtttcccacattggagaatctttagcaacagctatgcgcaaagtttcaagcttatctgttttgatgccagcattccctgcatgcatctttgatccaaaggcaggagtgagtaaaatattgcatatgtcagatatacgcacgcaacatcatcaccaccagtcattatataagttgaaaaaattaccatacctcaacataattcaacctttgatcttccagacttgacaaacattcaagcatacaactaacaagttctggcagatgaggacgaagggcaggaccagcaccctgaagacattaagaagtcataagcttaagatatcctctttagctaattattttggtgatggcaaatatataggcagagaaaataaca

SEQ ID NO: 8765 - DNA, 472 bp, Zea mays
tgctgtagctgctctatcctctgtgctgactgctgagcaatctggatcttcagaatttctacgatccaaagctagcaacacagcatataagactggtagagctgcaccttccttttcaatttatcattcattaaagaatagcttggcaaatgtagggggcgaaggtttcttactttctttggattctcaaatatgtattcttttccagtttatcattatttaggcattttgggttctctgatctgtattcctcgtttctctgaaatgtttttgtattgtctttgcaaattttagccctagaagtctatagtcatgtttatttgattttgttggtacacctttgccttttttatagttatgactaatgggatgcacatagatgaaggccactaccactttgctggcccatttatcgcttcaaagtttgacaccttggatcaatgcagatgtcgaccggattgtcataactcca

SEQ ID NO: 8766 - DNA, 456 bp, Zea mays
tggccgtgcgcgccgaggccgacgccgacgtcgacgtcctccgcccggtcacggtgcggggctacgtgctcctgatgccgttcttcggcggcgtccggcggacgcggtcggaggccaagtgccccgcggaggtgctcctgaacctggacctgttcgaccggttctggcggctggcgctgccgcccggcgccaccagggaccacccggccgcgaacccgttcgggccggacagccccgacctggcctcggtgcacttccgggcgccgctcctggtggtggtcggtggcctcgacatgatgcgcgaccgcaccgtcgactacgcgcagcgtctggcggccatgggcaagcccgtggagctcgtcgagttcgccggcaagccccacgggttctacctgcacgagccggggtccgaggccaccggcgagctgatcggactcgtcagccgattcctgcgca

SEQ ID NO: 8767 - DNA, 491 bp, Zea mays
tgcagaagtatgatcccattcaatccaacgaccagaaccacctcccgggtaaggcttaaactgctctccactacaattcactttggatcaaccactaaaatttcataacagtttttgaatggcaaatggctctatctgagaactttactggcttgcatttcaaggatggcacacccagtgcgccatttattccatttcaatcgactgagataaacaagtaaagagaaaggagagggaagaaatcttatctattctgtatacacagcttttaacctagagacatcaaagagatgcacatcaagtatcgctagctagtctgcgggtactccttcacaacaacacctccttcaaactctatgggatccggaaaatcgtcccgtgaagccctcttgaacgagaacgagttctcttcgtcctcgtcactcccctcggtcccctgagacttcgctgtatttttccgagcaagtgcttgccccgacgttggcatggcc

SEQ ID NO: 8768 - DNA, 532 bp, Zea mays
tgctggctgttgctgcttgcattgagatgtggatgatcagcgcagggcgcatggagcagtgggcgccgacggcggcaatggtggccaccaacgtcgtgatcgccgtcatgacggcgctgatcaagcaggcactgagcctgggcatgaacaggctggtcctcatcactttccgccagatggtggccacactgttccttggacccatcgcctacttcaaggaaaggtacgagggtgctgttggtggtgtgctgtggtgccaaaaaaggcgtgcaaatccattccaatgagaaaaatatgaacagttagttgctatagctggtcgtttcatgcatatgcatgcatggctatatatatatataagttgacggccattgcttctttttcttcttcacccccctgcaggaggatgagaccgaagttcacttccgagatcttcgtgtacatgtttctcagtggaattcttgggtaattaaacaccgactccactcgtcaatcgaccgcgtagacactgcttgcttttaacgattcatca

SEQ ID NO: 8769 - DNA, 511 bp, Zea mays
ctgccttggtaaccttggcgccggtcgggtccttcttctccacactcttgatgactccaacagcaactgtctgcctcatgtcgcggacagcaaacctaccaaggggaggatactgcgagaatgtctccaccaccatgggcttggtgggaatcatcttcaccataccagcatcaccgttcttcaggaacttgggctccttctcaagctccttgccagaccgcctgtcgatcttggtaatgagttcagcaaacttgacagcaatgtgggaggtgtggcagtccagcactggggcatagccattgcctatctgcccagggtggttcatgatgatgacctgggacgtgaagctggcagcctccttggcagggtcatccttggagtttgaggccacaaaaccacgcttgagatccttcacagcaacgttcttcacgttgaagccaacattgtcaccaggaagggcctcctgaagagcctcgtggtgcatctcaacagacttcacctcagtagtcag

SEQ ID NO: 8770 - DNA, 505 bp, Zea mays
tgaattgctaaaatcgcaattgaagaaagagaaagcagcacttgctgccgctcagcagatggaagtgatggcatccatgtccactcagtctctcaagatggacatcaaactgtcacagcaggaacttgaagcacttcatgccaaggcaaaggagtgccgagatagatcgggcaaggctctgcaagatgcgtcccatgaagctgacgaggcgaaggttattgctaccaaggctcagggggagctaaaaaagacagaggaagaagtggcgcaagcgaaggctgctctgagcactgtggaatccaagctcgaagcagttctgagggacatacaggcagcgaaagcgtccgagaggctggcgctcgatactctgacgacgacgacactggaggagcacagcaaggtcggcgctcgatactctgagacggtcacgcttgacctggatgagtacacgtctctggttcagaggtcacgtcaggcagaagaggctgcgcacgagaagacaaca

SEQ ID NO: 8771 - DNA, 1040 bp, Zea mays
tgaacctggaaacacctggtagtaaaacccatacatgatcgcaacaggggccatccacatcaccatggatgtaaccgcgaactttgtgatcactcctgacattgattctcctgacggggatgctgaaaccaacgtacagactcagccaggatcaaaaaaccaggcaagggggctaaataaaacagggctagaaatcttgctagacatacactagcagtagtgtagtagacacaatagatataacgaagaccataattaacaatatcaatttcgaagtgctcaattaatcgcacaacattgtagatagagaaatagaaaaggaagagccaaaattttatatatgtctgtgattggcattcaattgttactacacactggcataatggcaatgtcattcataaaagtataagacacggaactaggaacaaatagatacggatcttactgcgagctgcgatgtgctgcagtacctagcagagggcgccggagcagtgttgcagaaatatttagactagatcattcacagcgaagaaggggtgacacgaaacaggctcagccccggaagacgacgaactccgcatcgcctgacccagggctcggactcgggctcagccccggaagaggacgaactccgcttcgcccgaccctaggactcagactcgagctcaaccctagaagacgacgaactccgcttcgcccgaccccagggctcggactcagccctggcctcagccgacggtctccacctcgcccgacccaggggctcggactcgacctcggcctcgaaagacagactcgacctcgacctcggaggagcctccacctcgcccaacccggggctcggaccgtccatgtcacaggaggcgccatcattaccctaccccaagctgactcaggctacggggaacaagaccggtgtcccatctggctcgctctgccaaacaagtaatgatggcgccccgcatgctctatgacgacggcggctctcagcccccttacggaagcaagaggacgtcagcaaggacccgacagccccgaca

SEQ ID NO: 8772 - DNA, 454 bp, Zea mays
tgaacacacaagcgcgcacccttggccgtaagtgcagtcggtatggatagacctcgccggcgagcctattccggatgtgctcacgctccgcctccatggttcccaactcgatagagaacggccatgtctcctccgctggggtcagcacaatatatcccttgccagccgtgacaaccttggctgtctggctgaagaagcactccttgaaccacggaagtccacgagtcgcctcacgcaggttcaggctccgcacaggcacccaatcgatgccagcaccgctgtcgttgtggtcccgcttcagaaagaccctgagatcctcgccgacaaggctgacgacccgcaccaagtcatcgttgtcggcgccgtcgtcgacgaaccgaaaggtcgtcgactggtggtgtgacaacgatgcccctcggacgtggtctggcagacggaagctcgacagcacgca

SEQ ID NO: 8773 - DNA, 1342 bp, Zea mays
  unsure (1)..(1342): unsure at all n locations
ctcggtacccccgccttcaggcccttcagagcgatgctatgacacttcttgccaacaccgctcaggctgccaagctcaccctcgacagtcgggaagattttgtggtcgacctatccacagagttggtggaaaaggatctgcaggtggagaggctgaaccagcgtattaccaccctggagcagcaagtggagatccgagataacactattgatgtcttggagaaccagcttcacgacgtgcagagggaactcgaggaagcaaatgaccacttggacatgcaccacctggagatggaggccaatgaagcaggaagcgagggagaagaggctcccgaggagctaggaccagcccctggtgccaatgggactacctccgcgatacctccttcacccgtatccagtgtcgcttccaccgctcagggttaagcagtcgctttgacatttttaggcggatagaaacctatgcgagcttagttaatgtcagattttggactaggcttgtgggtaccttcccctgattgatgtaaccctgtgaacttttgaaatctgtgggatccttgtcaccatgttatcttcactttcgaacctaatattatgattatggcatttttccttccatatgagatgatatcttgtcgttcggaaatatgagttgggataacaatggcgacaatctctgttttcagatggcagcgaggcagcgtcgcgggcagaatgagcaggttcccccgccacctcctccagctcccacagtgcaggagctgatggcccagcagaatgagattctgcgacagctcttgcagcgccagccccaccaacagcatcatggtggaggccagcatcagcgacctccggctatggcaacataccaggagtttctgagcacgcagccacccttgttcaccaaggcagaggatccattggacgccgacgtgtggcttcgcgtcgtcgagtccaagtttcccctcctcacaggagactgccctgatgaggccaaggctcgcttcgccgcacagcagcttcgcggcccagctcggacttggtgggaccacttccgtgctatgctccccgctgatcatgaagtatcttgggaggaattcaagaccgccttcagaggacaccacattccagctggcattcttgatcggaagttgaatgaatctctggcccttaatcaaggaacccgcacggtactgcattatgcgcaagccttcaacgacttatgccagtatgcaggggatcatgctgattctgatgaaaagaagagagatcgcttgcgcaggggtctcantcccaagctacgggaacgactcaccactgttccgggctgatagcttcaatga

SEQ ID NO: 8774 - DNA, 232 bp, Zea mays
gttttccacgcgccccttctttgctcgtcgccttttcatgcaccgcagcagaggcgccagccctgctgcctggctgctagtgctagggcaggcagcagggcaaaagtgtactacgataaatttatatatatatacatagaattaaacgcgtataggatatgacgaactgctagctccccatgtgtcctctgcagtctgcacgtgagcagcggggtctgcagtgcattctgca

SEQ ID NO: 8775 - DNA, 345 bp, Zea mays
gaagtaatgccaaatgatgctaccatgttgtgctatttagtagttactaaacaaattcattcctgatatctgcactacttactttatctgtttcatacaatgcatccactcttctgtttaacctttacagtttattaggttgtcctcaccatgttttctccctgcactcatgtccatttgtttcttcttttttgtgacatgcaagttaggtctataggtatagtaagctatatagtgttgtagttgaataaataacattaactttgggaccttttccaggcatacaggaaaaggaaggagcctgatgtagagaagcaaaaggaaccaattctagagcatgtcaca

SEQ ID NO: 8776 - DNA, 489 bp, Zea mays
atgactcatctcacgttattgtgttgataattaatcatcaaacactttaaccacaaatgcacgtatcaactttatgtttagccagctatagcggaaactttcagctaaattctacataaaaaatagttaaatactttcagctaagtagggcatgacaaacagacctgaaggagaaagctgatggatgtttaacgtcgtttcatcagttaattaatggtatatacgtgtgtacgttgcgcgaattaactcacttgcaccgttccaaattaacaattctttatatgctgtatttaactgacgcacacacacaggactgttatacaactaatccctactataagaaccaaagctggttacgttgcccataccacagagagagagctaagaatttccccatggcggcctatcttcaagctctcgcctgcgccatgctcctcctagccgtctccccgctcgcttgcacggcctccaagacgctgctgcaggaca

SEQ ID NO: 8777 - DNA, 814 bp, Zea mays
  unsure (1)..(814): unsure at all n locations
tgctggggcacaagaacttttactgcctgcgctgctgggattggcgcagacggggagcagttgcaacctgagagggcactgctggtactgtacgatacattgccacttctattgaggtcttgtcctcccctggggcgcacacgtccgtcccgccctttcaaattaaccgcgcggcgcggtaattgtccgctgccggcagaggaacatttcacgcgtcccgtgatccctcccgagccgagccccactgaaatcagcaggcgcgcgtggtccgtggaatctccgcgctcgcgccacaaaatctccagcgaggaatgcgtgctttgcacagagggttaccgataaaactagtgcttacttatagctgctttgtttaatctttgatctgtctgcgactccgtggagattttttttcattttattttattaaccccgcggcagaggagggcggccaatgggggtgcgagtgcgacgcagtagaagttggagggaggagagagcgcggggggcggcagcaacagtagcagtacatgccaaagggcgtgatgaaagaagtcgcgagctggtcggactctttcatcctgatttggtgataccctgagtaggcatcgaggaaagacagggtttcgcacccagcagtggaatccacgatttgatcgatgcgaggcagagggtatggaaccttcggacatgctttgtttagacctgtgtagtctacacacattcgccatttnccttcttctttctcacagcacatgttggcaagtcattcgggatggatacctctttgatgaaccctgggccatcaacttgtgat

SEQ ID NO: 8778 - DNA, 497 bp, Zea mays
tgaggagagagcttggtgtaagtgaggaatgggtgtatgtactgaccaaggctgaggcatacaagctccattggtatgccctggatccagtgtttcagaaatggcagaggttgccaccgatgccttctttcgtcaatcaggaggaatccaatcggacagcatcttcggcgttctggatgtggaatgttgtgggatcaagcattaggattgctgattacgtgaggggcttattttggcgcaggaacagtttggaccagatgcccttttgcggttgttcagtgggtgttgctgatggttacttgtatgtcattggcggtttttccaaagctgttgccctgaatcgcgtttgtagatacgacccttttctcaatttgtggcaggaagtgagcccaatgatgactgggcgggctttctgcaaggcggcatttttgaatggcaagttatatgtagttggtggagtcagcaggggtcggaatggcttgcttcccctgcgttca

SEQ ID NO: 8779 - DNA, 489 bp, Zea mays
tggtataaactcaatcataaatggttcaaaccttccccgtatcatgtctgtattgcttgagagtactaaagatgctccaaatgtagccgagaaagtctgtggagctatttattttctcgcccaaggttatgaagatgcagagtcaacgtcttctgtgctcacgccttatctatctaatacgattgctgctcttctttctgctgcggaccgtgctgattccacccatttcaggcttcgtgcttctgcttatgaagcactgaatgagatcgtgagggtcagcaacatacctgaaacttcaggcatcatagcacaattattgcaggagatcatgagaagattaaaccttacatttgatctccatatactttcttctggtgataaggagaaacaaagcgatctgcaggctttgctatgtggtgttctacaggtcatcatccagaaactgagcagcacagatgcaaagtctataatttctcagaccactgatca

SEQ ID NO: 8780 - DNA, 519 bp, Zea mays
tgcaatcctaacgttcggaaaattcacaacccatatatatattgaatcaacaattcaaatgttcaatatttttgaaatcttcaatcgagtcaactaccaatcaatactttaatccaaatttcaatcataaactcatcaatacttcaactatcaatcaatactttaaatcgaacaatgtgcttccacaagttgactctaccactgcttccaccaattttataataagacgaaaatataaatattgaacattcatatgtactaaagcatatacagctaatgacaggtaaaaaaatgctgggtatagtatagctagcttaattataaaagacaattacctgaacatatagtcgcactcgcatcgcaaacccacctcaaactgtaaatataccatgtatctgacattggctttggctcttaatcaactggggtctacgcactggagctggacgaaccgccacgccgaaatcgctgagcctagaatcgcagggcaattctcctttggcacgcatatatacggca

SEQ ID NO: 8781 - DNA, 566 bp, Zea mays
ctcggtacccctgcatagctaaccactccctccgtgcatcatgtaatttaacgaaagagtatcaatatctgagtcacgaaatagatctgatataaagatatgtttcatggcgaatctagtgatacctagtataagatagcatacaaatttaaacaaactaaaatgatgtagctcaaaaaagtagtaatattcttggagaattttgagctttagcagtccatttccgaggaagtagcagagtccaagtatccaagctgtggctagctacgagctacgcggcagcttcccatttccgaatatctagaatcttctgcccagcttcatgtataaatccttcgctccagtgagtcatccttgcttctccagttctcctgcactctgctccccatattttatcccttcggagttcggtcggatcagacgcttgtgaatcctggtcatcattcatggagaagaaggcagctactacagaggaaccccttctcgcgccgcggtccgagcacacggtcgcggcggaggccaagcggctgctgagcctggcggggccgctggtggccagggggatc

SEQ ID NO: 8782 - DNA, 530 bp, Zea mays
attgggggattcttgtatcattgaggaggttcatccggacactctgttgcagaaaactcttccatcctttgtagcatgggcttggtgcttccaaccgaaacaattgcaccgtgatatgattctgcatattctggagccaggcccacaaaactctgaacggagatgcttagcctataacataagcgtgagggtacttgcaatctgccatgatggtattagaggtccctcgctgctgactccaccggaggatggcgatcagtctgatggttcggacgacatggatgaccaaaggaatgttgagcctcggcgtttgggcagtcccttgccccagcgacggtctgttcaccttcgccttgggcctcccccgccgtctggacatggaaggacttcacatacatctaggggacatgaacagccactctttgacgcaccggagttacagcagatggcctcggataatgggatgatactccttaatgagttgtctgcagagaagccaaacagtctccatgatgaggcccctactgaca

SEQ ID NO: 8783 - DNA, 596 bp, Zea mays
cgaaggctaacacctacggatttttgaccaagaaatggtctccaccagaaatccaagaatgtgatctatggcaaggaaacatatgtggggtgaggtgtatgagcctctggtcgacgatcaatggccacacaaccctaatttttgtacacacccagcagcacgggcgtgcgcacggctagacgacggtggcagtgcgtggagaggatcagagatgaggctacgaacgagagggagagacgttttgcattgtcatttgacattggaacgaacgaacgaacgaatgagtaaatgctttgcttgtctagtcgttgtcttccaggggaggaatgaacaggtaccgctgcatcattccacaggttcaggccgggtcgcatgcagtctgcacgcaatgccatgcatcaatgcatgcacccggcagcggcaatgcagtttcttcagtcagacagggaagcgagcaacaggtaggctaatgcattctgattcctttttgacttttttgtttggatacgcgtcaacgcgagaaaaaactacagtgttgatgcatgtgcgcatatgcttgactcctgagtgatgacggcaagcacttcggggaggca

SEQ ID NO: 8784 - DNA, 1057 bp, Zea mays
tgcaaccctatcaatcaatcatccagatgttaacttgatatatagttctgctcagatcgtgaatgctgatcaccacagtttaacacatcccttcagtacatcggaaattccaatactagaagacatcactataggttcttacagaactattccaacaggttggcctaatggactgttgggcgataatggcaccattgggcatgaatattttgaaggcttttctctgacagatatggcacattggaaccaagagaatactcatggcagcactattgttgtaaatgatggtgcaatgctttcgaatacttcaattcattcagagtttcacggagatgtcatggtaatgtccagggaagaacatgagctcttcacgtggcgttgtaggctgaaacaacaagaacctacaagccctgctctccctcaactgaatgacaacagtgctgatctttatgtgcagcttgaaaccaacaattatgcggaattgttactagacacaataatctaccagactggtcatacatcaaacattgaatctgctccctcactgacgaacgcccagatcgatcaggctaaccagtaaggccttgtttggttattcctatatcgcatggattggatgagattggaaaaaattagtagagattttgacttgctatggattaaaactcatccaatcctttccaatccacatgaattggagagaaaacgaacaagccctaacaggggatcgaatacactagctggaatttgagttactgacacaatcacggacgcagccggaacggagcacgcagccgctgaggtttttgtggaggcctagcctcggccgcgtcgctctgggtcagcgcggagcctgtgtatcagtgtatgccgtatgcttatatagatagccacacggccggggggcgatgtgacgacgcaccagcagcgaggagcagcggcagcggcggaccacgcatcctccctatcttcacgaaatcacgatggcgcccgcctgctccttgctcgcgctcgccctctcggtctgctccgtcgtcgcggtcgccgcggcgcagca

SEQ ID NO: 8785 - DNA, 572 bp, Zea mays
tgcgccgcgagaacgcgcacgtggccaccgcgctcgggctcaccgcgcagggcctcctggccgtcgacgccgagaacgccgtcctccgcacccaggccgccgagctcgccgcgcgcctcggctccctcaacgacatcctcgcctgcatgaacaccaccaacgccgccgccgcctcctccgacccctacctcgccttcgacggcgcggccaccgccttggacgacctcctcaaatcctgccccgacagcatgatgttcgagtaccagctctgttagctcgggaccgaagtcgccatggcagcacaaagcatcgagaggaggaaaagaaacatctttttttttggtgctggtgtttcaggttagtgatctgctagtgagatggaactgaaggccagaccagacgtggcggtgagccatgaaactaccgtcagtgtactgtgctatcaactgggggtgggaaaaaaaacccaactgggggctgggtcactgcacctaattagctagctagatgatgctggggttatggttaatgaactactacttactactaattaccagagtaccgagctcggt

SEQ ID NO: 8786 - DNA, 1103 bp, Zea mays
ttcgagctcggtacccctgctacgcagtatgcacatgttgaacgcaaccatgtacacggtccgcgttggacggcaccatcagtccagttccgaccagatgctacggacgactggtacaaaagccgtgaagctaaagttgctcgatcgatcggtcgcttgccttcggaggttccttggcacgcgattccgatccgttagcggcgcgcagagaggcatgcatgcagtgccgtcgccgcgaagcttccctgccgccgcgcgaactcttccactaccactgacctgacctgaccgcagcccacagcagtcagcaccggtggacggtggcgatcgagggaagcaagaagaaagggagccacggccatcacgggcgagcaaagcggagggaaagcgcgcgggagagaaaagaaaacaaggaataaagtctactctactttttacaggaggaaaagaaagagaggcctggatcgatcgatccatccatctcctcgtgtaatgtaatgttaggttggcatggcgtggcgcccaaaaggactccccggcgattcgcgagagcgtgccagagcctcaatgtgccccaccttcttgctgctccaaccttgaagggccctagctgtccccttgaattttaaatcaagagtggagtatggacattggccaacagggacagaattccaagcattgtgcaccacctcattccaaaaagattcaaaatgaaaacgccttttaacaactttgttatctctgatacccactagtgctgaaattatgactctgatggctattgtgacactcttacacctcttctatgtgataacatgggtgttatacaagtttctcatgatcttattaaacatattggtgtttatgcatcgttcactcggtcttcaatatgtgccttcagaatcccaattggccgatttcttcaccaaagcgcaaaccagagcacatcactttcacttgatcacaacatcgcttcagatcctagccttccaccttgagtttcacgggggtgttaaggcccattctattgctaaggcctgctggcctctatatgtactacagtccctattgacagattatcatctgtggttcctaaggtgaga

SEQ ID NO: 8787 - DNA, 556 bp, Zea mays
acgagcaggctggtacatatcccagtgctggtggctgcaggcatagataggtcttacgaagcacacaggtagtagctgtgggtttaccttggaggtggaggtggcaccgctggctcctggcggggcggcgcttggacagcgcactgcactcctggacttgagcggaggagcccggacgagggagcggcacaggtagtaagaggcagaggcagtcatcatcttttcttttctttttccccctcgggattctaagacctcgcgcaggcaaagagggccctgcggcggccctggcactgggcgagatctggcgccggggctccggcgtgcagccagccgagccgtgaagccaggggaagggatggggaaaggaggaaatatcaggattcaggaggaaagggtgaggaaggtggagagctgctgttgcctgttgggctgctcacccgcccgagatttctcttcttgttgggcttaggtcacaacagaaaacatgctgaaggtgtttgcattgttttcagctttcgagtttcttagttcagctttgactcgatgctacaat

SEQ ID NO: 8788 - DNA, 467 bp, Zea mays
tggtcgatctcgtccgacgtcagggcgtctgggacagtcttggcgtgcttggcgaatatctcttcgaacttgtcaggaacaaacctgaggaatcatttcagtctttgtttagcttaggataatcgacgcatctactgttcttgttcagcagcggttgagtgagtccatggcccaccttccttcggcgtcgtatgaccctgaatcgcttccatgttttcctttctggatgtcctctatgtagatatccaacttcgatgacgttgcgttttgctgcatgtgtgttcgagcatttaacaccaattttaaaataatatacacaagtgaattaataagtttttttatataaaacaaagacaggtttctccatatagcagatggccaggtagctagctaatcaagccagaaaatcttgtaattgtcagctaacctagccagcaaacagcaggcctgtgttgtcacagtctgca

SEQ ID NO: 8789 - DNA, 713 bp, Zea mays
tggtctctggtgctctgccttgatccgtcgacaactatcacacatggccacatgctttgcgatttcccttttcattccgtaccaccagaatttcttcttcaggtcctgatacatcttctcactgccagggtgaatcgaataggctgtctcatgagcttccttgagaatcaactcccgaatagactggacattgggaacacacaagcggtctttgaaccatatcaccccttctgcatcttcccgaaaatctttgcctctgccgtctagaatcagtcgccgaatctcactgatcttctcatcattcttctgcgcttctttgatttcctgctctagggtaggttccaactcgactgtgactcctcgcgaattgttcagaaatccgagactcaacctgtcaaactctttggccaactcataaggcatcggacgagcgaccatcagattgacttgactcttcctgcttaaagcatctgccactacgtttgctttgcctggatggtaatgaatctccaactcataatctttgatcaactctaaccatcttcgttgcctcatattcagctccgactgagtgaatatgtacttcagactcttgtgatctgtgtaaacatcacatttctgtccatacagatagtgcctccatgtcttcagtgcgtgaaccactactgccaactctagatcatggattgggtagttcttctcatgaaccttca

SEQ ID NO: 8790 - DNA, 497 bp, Zea mays
tgcagagaacgacgaccgtcctgcaacaaataaagaactccaaggctaggactgcagcagatggagcatacacatacgcacaccagacaccgcgagtttgcttagctgctgctggcatcaagatggtaatcaagtccaaacgggcgagacgaacggaaagggggtgacaccgatcgacctcgaccgcacgcaccacgcccctgcacgctacgcaactcaatattacatacagacgactgcggcacgtcgcctactgccagttggccgtgcgtattccatgcacggccaactaatcacaagtcaccgatcgagaccggccaaactacgtacatggagacgttcagaaatgaaggctccggtcgtctcccttttttttttcatgcaacgcttgtagctagtagtatgcatgcatatgcatgtggctgggccggcggcgcgttggattggaaccatcagatttggtacactgcatgcaaagttgcaaactcgtgtcgaca

SEQ ID NO: 8791 - DNA, 982 bp, Zea mays
ttgtatgccgttgttacgtgaggtccccttgacgacaccccagcgtggcgctcttcttccaggagacggacctccggcccggtaagaagatgaccgtccagttcgccagcaccgggacgaccggcaccaagttcctcccgcggagcgaggccgaggccatcccgttctcctcacagaaggtgcccgagatcctcgcccgcctctcggtggacccggactccgtcgaggcggcggagatggcgcagacgctgcgcgactgcgaggcgcccgcggccaagggcgagaagaaggcgtgcgccacgtcgctggagtccatggtggacttcgccaccgccagcctcgggaccaggcacgtgagggccgtgtcgaccgtcgtggcgaaggagggatcgccgaagcaggagtacacggtgaccggcgtggagcgcgctgccggcggcaccgacgacgacggccgggtcgtggcctgccacgcggagccgtacgcgtacgccgtgttcgcgtgccactgattctttgaatacttttttgggctcctgatcacctgtgctgacatcttcaagctttctcttcttatggttgtgctttgaatgtttggacgtctcacccagttggggagctttcttgtcactccttttatctttcttcttgtgagccctttccctttctttctgaagcttcagccaccagagcaatcgtcaattctgatttagaacagacgacgggatgcaatgcagtatttttgcaatatatgaattttgatatttacaaggacacaagaaatggttgtagcatttgcacagttcagacagtgatgcttcacaaagaatgttcaattatcattgacttataattacacagttagccaaagaattgcattcagtttacaatcatgttgaacacattactttcttgacaacagttaagacctgcaacactgcacactcttgaacaaaaactttcaatgaacacaaagatgtca

SEQ ID NO: 8792 - DNA, 481 bp, Zea mays
tgctgcaagatcccagaacagaaggttgctgtctttcctgtaccagattgtgcttgctgaatgacatcaagacccttgcagaagggaacaattcctctctgctgaattgcagagggcttctcaaaacctacaccgcaaggaatgggcagtaagagaaataccatgtaaaaggcaacacgctaaaacaagagactcccagcctaccataagcataaatgcctctcagaagattctcttggaggcccatatcatcaaaactctcaaaaacttcatcatatgaagtgaagaactcctcagtctcaccggtgctcctgtattacataaacatatagaagtaaaggttattagatatcacttggctctcaagtcaaagatgataaacacaagtaggtaaaaaaatttaaaaagaaaggttcatattacttacagcagctcctgcatcttagaatcatagtgcttagcatcgaactgagaaccctca

SEQ ID NO: 8793 - DNA, 488 bp, Zea mays
tgtcatgggtacaaaaaggctcccatttcccagtagggtgtttgatgttgttcattgtgcacgatgtagggtaccgtggcatattgaaggtactttctatcatgagaatcctgctctagcacaatacagtccctttgtgttagctgcttctgtgacactatgcctgttagttatttggcaggcggtaaactcttgcttgaactggacagactgttacgtcctggtggttactttgtgtggtctgctacacccgtataccagaagctgcctgaagatgttgagatatggcaaggtattccatgctttaatttcttctctacagttattacagtgaattacgaatttcatgccccaagagttatctttgttctgccttgctgtagccatgtctgctctaaccagttcaatgtgctggaaaatggtcaacaaagtaaaggatagggtgaatagagtgggtatagcaatttacagaaagccaacagacaaca

SEQ ID NO: 8794 - DNA, 509 bp, Zea mays
tgcagcccatactgctgctcctgaccactctggacgatgcgaatcagtcgcatgacaacgcacagcggcagcagaataccagcagcgcgaagcaagtacatctgcaaagaaacataacctctgctcttagtcgatggaatcaggttacctattaaaactctgtttttttctgcttggccatgccaacaatgaactcactgccaggagactgaacgtgcagtgagctgctgcttcaaccgtcaccactgcaaccagatgccatgccagcagcataatggtgaactgcacaggattgcagaagtcagaatcctgtgggcagccatggatcctgaaggacggttgtttcagtttgctgcatgacttgaaacagatcataccgtgatcgccagcgaccggcaccatgtggcgcattgatctgcggtgtaggagcacctggtgtagcctgcactgccactcaagccctcccgagattccaaagattgcatgtcctcgtgttcactacacgatca

SEQ ID NO: 8795 - DNA, 530 bp, Zea mays
tgcaaatataccgcttcctgtcatctccttccacttgggagcagagcatggtttcctgaagggggaaaagaacagcttgtcatctccttccactcgggtggtactctggaatctaaataaccaatgaaactacgacatacgcagaacttgccgaaacatacacagaccaggagcgctgtgatcgacgttcatcgatagtgcacgaaagccagattagtcgttgtcgtttaaagagtgcaagtgatctcaaatggaactattggtttcacagctcatcgttagtcagcataccttacggggagcattttgatggctacggtcagtttgcagtactccaacatagttggtgagatggcaattccatgaagggctaaaccatagtcacattacggtaacactactagccattccttttccggagcctatagaccagaactgaaaaaagaaactcttcaagaaccgagttaaaagactctagggcgcatatcgcagcaaacctcaaacaaatccaacgaagttctcaacccgca

SEQ ID NO: 8796 - DNA, 556 bp, Zea mays
tgcagctagctgcatgatgcatctatcgctcagtcggtcgtcagtggtgcctcggttcatggacgctggcgccgtagtagtcctcgtggaattcaggaagcctgtgcgccgctgcctcgacggcctgatcctgctgcccagcgacagcgacagcgacgacgcttctccccgcctcgctgttctcgcccgcagccgcagccgcaggcgcaggcgacgacgacgacgacctctcctccctgctggcgggcgcgtcgaccgttcgcgtcaagccggtctcgccttgtcgtcgtccgtgctgctgctgctgctgctgagtcgtcacaagaacagaagcagaaggcacgatcgctgcttgctgccggttggctgccgcgcggctctcggcgtccaacaaccgtatggcttcaacctccacggtcgtcgccgccagaaacacgagcaggaagacggcggcggtggccagtggcaaggaagcagtagcagtcctcctcatctgcatgccgctagaagaggagctagacgctagtgcaccttcactactactcctcagctctca

SEQ ID NO: 8797 - DNA, 996 bp, Zea mays
tgacgtggccgcccgccgccgccacgtgcagcgccgtcctgccgctcaggctgtccgccttggacaccttgaatcgaaacagataaccaccatcgcccgtcggtcggttgcacttgcactgcgctgggaaaacaagggatggcgctagctagctactcacgttgcatctgaacagcagcagcgtctgaaccacctcccagtggccgaaccggcacgcctgcatcagcgccgtctgcatgcgcagtcgatggtgacccaaaacaaggagaaacgtgagtgtgagatcgatcatctgcaatcctcctccactgctggttggttggtttgacctgcaattaattacctggccgtagatgttcctgccgttcacgtccgctccgttctccagcagcaacgcagcgatctgggcgacgaacaatgttaaaacgaaggaacaaatcagctgcttcttactgctgctagtgccacacctcttcctgtcctcgtctcaccaggagtcggtggccgccatggatgtgccgtctccgtcttccctaccaccggacaagcagcaggtggccatcatgatgaatctctcaagcgctgtgggtagcagttgggcctcgggcacagacatgtgtgactggactggagtcgcctgctcacgctctacgtccggttcttacatggtcgtgaccaacatcactttgtccggctacggcatgtccgacgcctccgtcttctcccccttatgccttcttgacaccttgctgtccctcgatctctcgatgaatttcttcaccgatctaggggacgaattctccgccgcttcttgccgcatgatgaaggaagggctggtgtcgctcaatctgagccacaaccatctcgacggttctatcccttcagatcttggatcctcaaaagacctagcgatccttgatctttcctacaacaacctgtccggtgcggttccaccttcgctatggaccctccagaacttgacgcaggggtaccgag

SEQ ID NO: 8798 - DNA, 1025 bp, Zea mays
ctctagaggatccccctggtggttgagaggtactaccagcaagtgacgatgtactgaggccagtagattgggctggggagctgaacccaaaaaggttgtttccagagctcggaaatgtaaatgaaggggttgaagcagactgtaaacctggtgcagtggaagtactagatggtgcagccacagatattccagcagcatcacttgaaggtgcaactgcggtgaaagtaggcgtagatgtggcgggggaacttgaaaagcttgcaatacttgatgacacaggtgaaataaaaagttccgatgatgccttgctgcttgcatctggtgcaacagatttcacttcagcttttgtaccccctataccaaatgataaggtgctagtgccatcagatttagctgatgttaccaatgacaatccaaccggagcactggaagaaaaactaaatcccgtaaatgcaggagacgatgaaatagctggactgctactggatacggcaaatatggaagtggaaacaggggcttcatggattcagtttgatgagcccactcttgtcctcgaccttgattctgacaaattggctgcattctctgctgcatacgcagaacttgaatctgtactttctggattgaatgtgcttgttgagacttactttgctgatgttcctgctgagtcctacaagtatgttatttatgttgctagctcacccttttctcagccattgctcctcctagacccttttgtgatgacatcatacttgctgttcttttgaatgcaggaccctaacatctctgagcagtgtgactgcttatggttttgatcttgtccgtggaacccaaactcttgggcttgtcacgagtgctggtttccctgctggaaagtacctctttgctggtgttgtggatggacgcaacatctgggctgatgatcttgctacatctctcagcactctccagtctcttgaggctgttgttgggaagggtaatcatgcttgcacttattgtctgccataaaattggatttagttaca

SEQ ID NO: 8799 - DNA, 505 bp, Zea mays
tgtcccagtaataaaatttattgggctatgtttgtatggtgggtgaagtgcatgactcaagttttagaggtcccactcctgctggtaatatccagtgagttgtcagccataaaggaagaggaaaatgctctgaactttggacagtgactgaagctgggatcagttgcggggggagaaaaagatcttcaccccttttttggactctactcatacgcacaaactgagtttcgtggggtggacaacgaaggggtcttgggttccggctccctgtcgaaaatatcagttttgagccatttgagcttatccccaagtagaggacatatttttttggtctgctacctacaaagctggacaaaggtgatatttgtgaattgtgagtggtgtgccgagccagcaaggtagtagtgcatgggagccacatctttgagtcactgttgtgctggcacactaggagacatctccccactgcatggttgccaggttcagggacacatgcccttgtgca

SEQ ID NO: 8800 - DNA, 472 bp, Zea mays
tgcaggtcgatgggcgggtggtcagattcagtagcggcgcacgaggccggtgcagcggtccttgatccagcggaagcccttgcggagcgacgccttgaccctggcctccacggcgtaggccttgtacccggccaccctccgccgccgcttcgcctcggggtcgcccgacgaccaccacgacgccgcgcgcccctcgctgccgcccccgtcgtgcgacgccgccggctgcgcaccgccccggaactcctcctgcaggcccctcatcacgctcttgcaggctctggacggacgtgggaggccccgtggcgcccgcacgtatatctagcggcgagacgtgaaaaggctgctttcgtcgctggtgcttggcatggcattggcattggcatgccgcttcttctggagaaatttaaaatatcgagcaggtgagggcggcacgctgcgctgacgctgaacgatgtctccgatcccagca

SEQ ID NO: 8801 - DNA, 481 bp, Zea mays
tgcaagtcgtgttggttttgaattgacaaggagaagaagcgtctgatctgaaaacgggggcactggcactgacagagaaccggagacctgtaaagaagaaacgactgtacacagctcttaacacggccaaagccaaactggaaaatgccctacatcaccccaccgaccgagtaggtggaggaagaacaccaaggttttcactctcctctttcttaccccgaaacagaacaataccccagagaagaggaaaaggaccaagcggaaaacaaggcacaagacgatgtacacaacccactgatcaactcaaaacacttagtactactctagcatgcatcctagcactggtacagcgagaagcccctgttcttccacagagagctcagcgtcctgcccagcttcctggacttgacattgaacaacggcttcgactcccggtggtggcacgcgataatagcaccgccaccattcccgccctccgcca

SEQ ID NO: 8802 - DNA, 859 bp, Zea mays
cagctcggtacctctgttgcttttcaggttcatagagtttgaagaaagaatatatcttctctagtcttgtcgggaagaggaagaggtttaaggtcctacattgcccgcaaaagaatgagaacagatcttatcagtttcaaactatattaatggttggtgaaataaaaagtgtgaaaatgtagacccttttgttcatatctaacgatgttcaagtgaggcaaacattatttcctgcttaacttgccaacagtgcagcgaaaaaaaatgatgacacaattctttgtacctatcatatgtgaggccaagctggaaacaagttcggcatccctaacttatgtttagcaagcaaacaccttactagtatgatcaaactaacctaagggaggagtggcagggtgcttcctaaatcagtagctgatcacaaacaggtcttccccttgctgcttaaaccttgtcagaattcctttcttggtatcatagccatggaaatatgttttctagtgaaaacttggtggtaggcatctgctccatttctaaaaacctctcttgatacgtcccctttgttatttccttttgataaggtaacctggaaacctgttggccttcaattcctcatccaactagctgagacagtaaatggacatggtcctttgcggctgactttcttcaattatatataggatttctcttggtaagaacaaaccaagatttttttgtaacgaataattcttgtatcaccataaattttgccataggcataagtcatagtatattgacctgtcagatatgtaactgtattctcattcattgaatcatttaatgagaagattattcatttaaaaaattcagctctgtgcca

SEQ ID NO: 8803 - DNA, 474 bp, Zea mays
tgctagctagctagcgttcgcaagtagcagtagcgttccatcgaggtcgaggcaatggcggtgatggccgaagtagtgtcgaccaccggcgcggcgctccggagcccggcctcgcagccgctgccggccgcggtgaagaacgcagacgctgagaagctccagttcatcgaggagatgacctccaacgtggacgccgtgcaggagcgcgtgctgggggagatcctcgcccgcaacgccggcaccgagtacctcgccaagtacggcctcgccgccgctactacggaccgcgccaccttccgcgccaaggtgccgatggcgacgtacgaggacctgcagccgtacatccgccgcattgccgacggcgaccgctcgcccatcctgtcggggcacccggtgtccgagttcctcaccagctccggcacgtccgccggcgagcgcaagctcatgcccaccatcgaggacgagctcaaccgc

SEQ ID NO: 8804 - DNA, 494 bp, Zea mays
tggtgaggagccactaccagaagaagatccatccaatcctatatttaagcctattcctgagccctcacgattggagggctatctagtaactaatcagatctgcagttactgcaaccatatcaacgggtacagattctaatattccataaattctatgcctatctttattgagtcccaaagctcttgcatgattctatttttgggaagcatctatagatgtaggaggaagggcaggcctagtgcagtggtgagagctgcctcaccgagccattaggtcatgggtttgaagcagcctctcctcatttgagggagaaggcttcatcagtttatcccttttctagacctcactcattgggagtctggctctgggtctgtctttttttatccatgagattattgagtcttctagtgattatggtcttcacaacccaatttttcttccagctactgtcatgtttgcagtgtttaagtgatgattgataatcttcagatca

SEQ ID NO: 8805 - DNA, 512 bp, Zea mays
tgcatgcatgcatatatatgttggtacggtgttgcattagtaattgatcgatgatagctcctcgactactgctgctgcttactaagtaccatttggcctgcttcctggcgctgacgtggatggcttgcctggaccactcgaactcggcgtcccactccgtcgtccgcccgtcgtagtggaacaacatgacgtcgaagttgtccgagaactgctcggtccatccatggccatgggcgtattatatttgtgtcgtcgtttaccaacaagctagccatatcaatcaatcaaagtgacttcaatcttattaccttgtgaaccgtcgcgttgacattggctctctcgctgtagcccaccgtcagcgccaccaggtacttgcgaacgggggtgtcctgcgtgcgcatcacacgatcggacaaatgatgtttattttggtgcatggtagttacaagcagccagcaaaaagatcatgagggagagagcgacctcacgcgggtgtccccagagccgacgca

SEQ ID NO: 8806 - DNA, 461 bp, Zea mays
atgaaatgaaatcagaataacgaaattagtaccatatcttgaatacatcaaatttcaatagattgaacatatacatatgcatgtaatgcattaaggccctctttggcaaggctcctctccagcagcttctgctgcagcttcgcgtttatttccataagccgtaccaaacggtattttgatacatagcttttggcaaaaaaacacttctcccttttctataagataggtgaagccaaaaaaaagtggcttaaccaactttggcttatggtctttttgcgaaaaccagctcccaccagatgcatcaggatctaatctcctccccaccaatcagtatgtgctgcatcgtttcgtctatcacgccggcaaaccatacgcctgctgcggcttcttctccatatgggtcatcgcctcgccttgctggtgaccaacaagacagacgctcgggcacgttgggaacagca

SEQ ID NO: 8807 - DNA, 517 bp, Zea mays
tgatgcaattaacaattgatactagtatgctgcgtcttttcactgttcagtttgtcctagctgatttggagtgtagctagccgcgacatatttcaggtctaatcatctaatcaaggcagatggattgagatgtgcaacatatgtctctccagacctgtgtgaagtgtaggtgttgaaagtgagatggtcgacgataatggaggtcaagcgggagtccatgcatgatggattgtgagcggaggatgcatgggggccgagtgtctgaaggatggaccatagatgactagcacttagacacatcaacaagctagcaagggtaaaggcaagacagggatggaaatggcgtgatgggagtctaggttagggttgaacctaggcaaggcaaggcgcatagcgaacacttgatggatcgttgagcttagtaagacatagaaagaactcattgacattgaaggctttgagtagcgcctacaaaggctagctcggtggatttgacgggtttcgcctcaaaaccgca

SEQ ID NO: 8808 - DNA, 469 bp, Zea mays
tgcgacccaaccctaacccggcaggccaaggtccaaggcgatgggcaccaggagcggggaggcaaaaccctggagacctgagcaccaaccctagctcgctcgcagcaacagcttgagtctagaaatggatttgcaggcggaggcggcagtggtgtgatctggaggaaggagaggggatccgggcgctactgctattttcccttctcttcggcaagggtaacgtttaccgttgtggcggccattaacacggcgcctgtttcccgtgggtgatgatggtccacggcggaggccagcctggcaagttgggccgggcttccggaccgactgcggtgtagcgcggctccggtgcctggtggtagactagctgtcagccgagcagcgcggtacgtggaccaggtgtatccatgcgagggtcccggtcgtgcctgctgtagtgctgtccgctgcttccctctccacggaaaaggca

SEQ ID NO: 8809 - DNA, 535 bp, Zea mays
attcgagctcggtacccctggcagtgcacccgctccgtagctggcgagagcatttgaccccgcgtaaagtaataaatccgggtcgccgcgctgacttctatgctatctcttaaaacgtgagcagcagaactgggggcaaggtcagactcgcaaacaaaacaaaacaaaacaaaacaaaacaaaaaagacggtgatgtggtgtggagctggacacaggcacgcacgcacgcacgctgactcggactcgtacactggcaaacggccgggagaggtgccgtgcgtacttggcatttaagggagccacagtgttcgtcagaggtccatggagagagagagccctgaattctcgagaagtgatcgagagatcgatgcaatcttctgcaaaaataatcctgtcttccctgaatatttctgccaggtctgactttctagaccggtgggtgactcataagagcgtcacaaaatcggatagagagaattatgtatagtatgttactatgttttgacagaatctccaggtatatgatgccttgca

SEQ ID NO: 8810 - DNA, 502 bp, Zea mays
gagggtaattgaccagtaaaagcacaatcagagattgtcaaatattccaatgtcgtaaggttgtcaattaactgtggaattggccctatggaaccacaatacctgatatccaagcttctcaaactggttaggtttccaatccaggagggcatggtcttagtagagtagcaatcagaaattttcaatgttttcaagctctggagatcaccaatccatgagaaatttgacctagcctcaaatgaaaaatttaccgaagagagtcgcaaggtactaacatgttccagcttgtttacgaaaaaatagggaggttccatagaaattgatcttccatctattcccaggtctgtcaaagatgtgagattgcccaagtagctcagagtgacaccagagaaaagtgtatcctgtagattcaaagtttccagcgagctcccatggagaaattttggaataagccccgagagttgatcgttatttgacacatccaatactgccagattcttca

SEQ ID NO: 8811 - DNA, 505 bp, Zea mays
ctcggtacccttgccgagctattgcgcctgctctcgtcgtcggcgccgccattggtcgcctcgacgtggagaccgacccggcgagtcactgccgcggccatctcgaacggtgagccacgcctagttctagttcgtgttgtgttggttggtgcatgcggcctgccgaccgagggttatatagggcggtaaagcagaaaagttggaagacggagaggagctgaggcgacgactgaagaagagtctggtccgttattcggggcatgttgagtttgtgatctaaattctaaagaaagcgactaacttggcaagtaaagcggaggtctgtcgctgggagatcgacaccttatagtaaatctactgcgatctataatcatcggaaaaatagttatattgttgctgaccaacgcctctgatttttctccttcgaccgaaggggtcttctctgtgtttgatgtactttgtaaccgagcatcatatcgggaggagtacagactacagagtacca

SEQ ID NO: 8812 - DNA, 1058 bp, Zea mays
tccttctcgtacccctgagcatatatttctgctgcgttaagacgtttaggcggtcctttggtgaccacaatgttctttataaagtttttcttatcgctcctaaaggggtgtttcctgggcaaccagcgtcgatgacaatcgaagtaagtgatctttccaccatgagcaagacggaagcaatctatatctgaaccgcaatatggacatgtcaatctaccatgtgtactccaaccggtaaaaatagcatacgccatgaagtcatgcaccgaccacaaatacgcaactcaaagtttgaatatctgttttttaaaaacatcgtatgcttcaacacctttccaaagctccttcaactcttgaatcaagggttttaacatgacattgaggttctctccaggatagtttgggccaggaattattaagcaaagaaatataaattcatattttatacaaagagaaggtggaaggttgtatggaataacaaagatgggccaacatgagtatgatgatgccatttgaccaaaaggtgtgaagtcatcggtcgtgaggccgattcgaacattcctcggatcagaagaaaaaactctacaaatccacctacacccgcagggctttctcaacttcatcaccaagacatagattagggagggtacacattcatcacccatgttttatttccgacaatcaaatcccaacgagcatagcaccgaccgaactgacacatcgcatgcataatgtgttcatccctctctaggaggggggcaacaccgttctacaactaaaaaacccaaaccaactacaaatccaccgacccagagttgtcagttgacccattattattcctccgcctgatcaacattacacacttgtttccttcattcatctgtccgttcttctttttaggcctcttcctcaagcagcatctgatcgaagtgccacacccctgtacgcaagtatcacatctcaacaatatcaactaggggtaacttcgagcactgagacatagcacatgaaaccaagttcagcaacagactaaccgtgccccttgcccactctcctca

SEQ ID NO: 8813 - DNA, 529 bp, Zea mays
tgacagattggttcagcttgagcttgagtgcttgacagtgcaatcaagcaagcacctaagaacacgggactcatcccacccaataaagttcaaaaaaaacatggctcattgtggtaaaaactattgatatcatcaaggcagtaataaaatcaacaaaagaatacatatacactcttatatcaaccggagaccagatcatccacgcataacacaatcgtgttaaggccaagacggccaaataagcatgtccggcaaagactcgagtgaaaactgcgtacaaggcctccagagtaaattcaaatgtaaaaaagaattgaacattctactgcaatcacacgtgtgctgctgcggttgtacattttacatacattccagatgtagctgtcacaagccaatcatttccatgcgaccgagtcgatctcattccttgcagatttgtacagctctagcctcttgaccaaggcatccctcttctccatcaaagcggggtcctcatccaacatcgcgctcaggggtaccgagctcgaat

SEQ ID NO: 8814 - DNA, 550 bp, Zea mays
tgtcccccgaggacatcagcccgacccgaggcctcggcaggtcaattccggcgtcggtcccgctaacggacgacccggccaggctccggccgaccaggtcttcttttcgagccaactctgcctctgttcgcgctgacaccgctacccctggcctcggctcatcgaagagcggccgagggtttcttctaactaagcaagagaagcctcggacaacaaggctgaccgagccgagggactcctacgcctccgggatacggatacctcactcgtcaccttctgcacgaggcaactcacacttggttaagcggttcagccagctgacaggagagtcctagtgctcgaaaatgaggaaaaaacatggcttcatgccaaaattacatacatgttcaggccccgacagccacaatgaacagaaacaccggcactcaaggtgccattacaaacggaactccggttccactcccgtaggtatgaacaaccccccacatcggagagcctgcgggacgacaaactcctggtgattcgccagcgggctccgcagtagtagcga

SEQ ID NO: 8815 - DNA, 503 bp, Zea mays
tgaaaggctggacaaaaagcttgcagctcgatatgatgatacctgtattatgatgattttcttgagtgttcgtaataacgtcttatatatactttaaacagtctggtatatatatatatatatgatatgtgatcttacatacatgtaatcatcgttttcagcgcagtctagctagttcggactctgaaacttaatttgaaggccggcgatgaatagatgctgaagcgcgccaggaaaaagtgaagaccgccgtggccgactacaccggcggcggccatgaaagtcgatgaatatctgcgcactgtccagctcatcgtgctctcgatcggtcgatccttatcgtcggaacctgtcgattcaattccgtcgctgagctgattcagggatgagatgcgatgccgcgcgcgcgcgcggcctgccggcgcagccaaagatggatgtcgatccatccatccgatcgtatcgctgtgatcttcctcccggctccgatgcgatgccagcca

SEQ ID NO: 8816 - DNA, 448 bp, Zea mays
agcagtagcttaactgaagaacttatgctcaattccccctatacatccgaggcccaaggtggcgccaagtcaccaaccaatcctcctcgtcatcctgacctctctctcaagcagtcagccaattagcaatcaatccaaactcaaattgttccctccaatccttttcacctccatctgaccatctatttcaccatcaccgtgacgcaaaccccgatcgacgcgaaaaacagagaacgaccaatgcaaaagcaaggacgatatatgcaccttataataataaacttctatatgccagtagctatcaatcaagaacactactaatctaagcacaacaatgactgaccacatacaattgtgacggcgaactttgtccagcgcagcggcggtggcgaatttaaggtgaaagtgatattgcttctctcccgcagcgaatcatcggtaatgcgca

SEQ ID NO: 8817 - DNA, 475 bp, Zea mays
tggtggggatgaagaagacgctggtgttctacacgggcagggctccaaggggcaccaagaccaactgggtgatgcacgagttccgcctcatcgagggcaagggcaagtactccaggcaccgcaccaccaacgacgacctactactacgcttcaaccccaaggtaacaaacacgacaattcctcttgcttaattacttggtcgatcgtgttgaaaactaaaaccgtgtgtctttttttttgttccggctttattttatatattgtgttcaggatgaatgggtcgtgtgcaaggtgcaccacaaagggggccgacatgatgccagcgccgccaagaagggcggcggaggaggaggaggagaggagcagcactactcgtccgccgccggaacgcccaacgtcagctccgtcgagaccggcggcggcggcgacgacgacgagttcctagttgactccatgctgctggattactccagca

SEQ ID NO: 8818 - DNA, 470 bp, Zea mays
tgaaactagcatcagagaatgttgtcatgtcagagtcgatcctgtacgtatccgctcctctatctacccttgaaacgctggtattaaattaagttccaccctaacatctaacatcgcattggtcttggctggctgcaggaaatttgaagcagcgttcaattcagagctgcagagtcttgctcctacgctgagtaacagttcacaagcggagccgtacgtgactcatctcgcacagtgcattcttggcgtgcgaatcggccaatgagttatttgatgggccgtacccatacctgcctgccttcatttggacttttggcacaatgccatactctatgtgcgccgctgcagtcaaggtaggtgcatatccgtttcttgtgaatgctaatgtggagctacgacgcgtttagtgaccctagggtggtgtcgggagccttgttatcttgagctcgaaccttgctgtgtgtttatca

SEQ ID NO: 8819 - DNA, 341 bp, Zea mays
ggcagacccagtgcccgaggttcccacatgagtgggatccaatgaaggcataatcggaggcaagtcttctccccatgaatggggagagactgcttcgaacctgcgacccagtgagacagctctctcatcagtcaccactgcacaaggcctgtaaaaatatgtatgccacatggaaatgtattagacaccgaagaacaataatttagtgctcgatgcagtctgtgtcattggggttccatcatcacaagaaaaccctgtcttggtgaaactagtcgatgaaataaaaaagaaagggtaaaggtgcttgagacggcttaattaagaacccaaagcaaaggaca

SEQ ID NO: 8820 - DNA, 1086 bp, Zea mays
tcagtacccctgtgtgaataattaatcatccccaaaaatcatcaaaacattttaggagacaagtaaaattcttcgtgactgcttgtgttaatgattttcgatagcatctcgcggaataatcatttgaaacttgttttgataaatgagagttgacatagatatacctctttctgtcatctatatctaccactgtttaggcatatatatgacgttgacgtacactgtaggtaggttagctagggtccatatgctatgcatgggtgtgtggtcagcagacaagttgtgcattattggtgaccaagagaatatatagttgctagctctcttctggagctgatgatttgttttaaaaaatattaacagctaaaatctttattgaaatccccctgctccctcctccccccaaaaaaaaaaagaaaaggaaaaagaaaacgccgcttcatgatatatggttgtctcaagtgatattaaactggtctttttggttgtttcctgccaactcggccaagatagtagacggtcctatatacctcggaccaagctttcctgacaccaaatcaatcattgacatatgcaagtacttcaaggaatgtatatatgaatgcaaggcatataatgttcctataggctaaaccaaacttagccacacaagagcaacttcaagagagcaacttaatgcttgcatatttctagatagcagcacagcggttaattgttttgctcctaactcacaaaaatatgcatcgaaaattagtaaactaggactttattggaaagcttataaagtccactatacccttggtggtattatcatcacaacaagatttgacacttagaaaggtcaaacaatgctaaacgtaaattctgtccagacttggacataattcaactactcaattcaaaaatccataattggagtctcaatcatccaattcaggtgctcccagactttttagaaagctagtagaattgtctataattcatttataaacatatcaagttaattcaatgcatattaaggtcaaaagacacgagaaaggctctgctgtccaaatttggacagattcagagatcacacttaaaaca

SEQ ID NO: 8821 - DNA, 495 bp, Zea mays
tgccggaaatggccaatcacaaaacccagagcgggggtaggctggccgcctggcccagggcctccctcccgtagtggccaggaacaggcaattcaatactccgagcacacgaacagcttaaaagggggagaacattccttcataaatgcggaccaatccaaccaaaccgccgccacgaaactctaataataaatccgcaaccacctcgccggtcgtgcgggagcggatccggagaagggaatagcagggcaacgaatccggaagcagtaaccaagcaccgacgcacctggcctgcccatgacaacggctaggcgccgggattcagaaatgcggatcgcggactagctagcgcccgccaggccaggcgtgatcctgtccccacgcgcctgcccgattccctcacgaaatctcatgaatggggggaacaaaaattaaaacttggtagacaagcagaacaatgctgccgtcacggagcatacaaaggccccaaactca

SEQ ID NO: 8822 - DNA, 518 bp, Zea mays
tgacggacgaccctgggcttccattgtcaatggtgccttcactttctttctatgcgaacatgcacggctctgtcatgtgactgaacaattgcattatgcgccatgctgacgcatggcttgaaaaatagcatcaagcagtcaatctgtcgcttttatcgcatatgcatgattgcacgccctcgaaagtgattgccgcagggttgtttcggttttgacagctctgccccgtgatacggtgttacaggtcgtcgggacgcacgggtacgctgcgccggagtacatggacacggggcacctgacggcgaagagcgacgtgtggagcttcggcgtggtgctctacgagatcctgacgggacggcggtcgctggaccggaacagaccggcggcggagcagaagctgctggagtgggtggcccagttcccgccggacagccgcaacttccggatgatcatggaccccaggctccgcggcgagtactcggcgaaggccgcccgggagatcgccaagctggccgaca

SEQ ID NO: 8823 - DNA, 487 bp, Zea mays
tggcaactgtagccccggcggattgacgtacaccggtacacgacgaccaattaagcagcacgcgcgagggatccggggatctgatgccacaaaaagaaatagatggattagaaaaaaagatttccatgcgtacgtcttaggtattaactcccccggagaaactgtgcagggggaaaggggaatgcatcaccgatcagttcagatgactactgactggaactggaaaccagcaggatgtgaccatgaaagcgagaggccatagaaagagacgagcggtttaatttagatactttacacagtctttggatttattagattcgaatctaaattgttttagtcaaacaccatcgacctacctcgcctcgcccccggccggtcgcgcgtccgcccttggcagccagccccgcgtggcccttgccggtcggccgcacgctcgccactgccactgtctccgccggtctcgtctcacgccgccgcgcccgcccca

SEQ ID NO: 8824 - DNA, 464 bp, Zea mays
tgctctcttctccctcgtctcgttctcgactaataccgaagccccgcctcgccacaactcgccaagccgctgctcgcctcgctacactgcatctcgccgcaccacgcaggaaccgtcgcgcacgtgcggagcaaccctcggagcctcgtggtgtccgcgcttcatcctcgccgacgtcacgccgaagctccaccagatcgctcgccgttcttgtccgtgtggggttcgccttgccaagtcgccgtcgtccatcgcgatggagttctttgtcgccgtccacattctgtcctcgccgtccgagcttcgcgttgaggtgagtaatcccccgtctaccctccagcgagcctcacctgtgtcctgtgctgtccagccccatctcgtcttctcggccggtaagcccaaaccgctcgtgctccctcctgcgccgcgtccaacacccttgcgctgcgcccctccgctcccca

SEQ ID NO: 8825 - DNA, 984 bp, Zea mays
agatccccctgcagcaccagcctaacaagagcgaaaacaagctaccgaaaaagcatgctgcacagagccacaaacatgtgtactgctcctatggttaactaaaatctgtttaggctactaaaatccattgcatgcacaactacaaaagaaataaaaaaaagattgtggacataccttaaacacactttgatagagcttcttaagttgatctaccttgcttctcgcttgcacttgtggattgtacctattatcatattcaggattacaaaaataaaactatcaaaagaatgttgtaaaacagtttatatgatcataatgcaagaacatttgcattccatacacattcgcttcttttgttgccccttgcctgcacacgtcttgtcacaacattctttagagtgtaagagctaatatagtttgctggcatattgtctttcttattgtttgtgtctggtgtacgaacgttgtttgcactacttggtgcagatgcaggaggatcactgacatgtcacaagaaacataaatcaaagattttttttttttttgcaaatgtggataaatgattgatcaaaataatacattagaaggagagtttcatgatctatgcaggatccacccttttggctaccaggggcagaactcagtgattggtaccaatgtgtgaaacatccatcatccatgtaacaaaaaattcgaataaaaataactgggaaaaaacagtagcttgaacaggtttcttgcaatctatttatagcaccccctattctattctaattaggcagagttgcttcttcaagaggcttttgcagataagtcatggcttatcagattatcgcatgtgaaagcttttaggggacaccatcgctgactcactgataaaattactacagacctgtcgtggtgcttgcttgtgcaactccagcagcagcagcaacctcggcaccagttttctcactcaaggctggtacagcctcagtgtcagca

SEQ ID NO: 8826 - DNA, 569 bp, Zea mays
cctgcagtcgactctagaggcatccccctgctcagcacaatcttaaatgcacgtgatcgtgactacctgaacagcatcgtacaaagttgtcaagggctcatgctcatgtgcccaaggttttttgaatgactgaacggagtttttacgagagtcaacaatcaaaccctatatacaaaatatcgtgttaggacgtcagataaacaggtcagcaaatgttgcactagaaacaacacattttcctttggttacacacctttgagtccaccaaccaaatcttcttgcggcactcttcaattggagccgacgtctataaattgatccaaccaatacatgtatgagtaagaactaggactaaggaaacctaccacacattcagatactaaaactatgtagcttagttacctgttttgaaatctcaagagcaatgagttctgcaataccagttccagcctgaaatcaaatacattatcagaatcttatctatgggtctactttcctcaaccaaaaaagattcttactaatggtcacaatctcaattcaaaagatactagttatagtaggcttcgaca

SEQ ID NO: 8827 - DNA, 517 bp, Zea mays
acccggcatcttcgaagccctagcaccggcaccctatataaacctcgcccctgtttcaccctgcgtttccctcttccccccactacccaaacccaacaggcggcgcagcagcatcgccaccaccgtccaaagatggtgaagttcctcaagcccggcaaggccgttatcctcctccagggccggttcgccggccggaaggccgtgatcgtgcgcgttttcgaggagggcacccgtgatcgtccctacgggcactgcctcgtcgcgggcctcgccaagtaccccaagaaggtgatccgcaaggactccgccaagaagacggccaagaagtcccgcgtcaagtgcttcatcaagctcgtcaacttcacgcacctcatgcccacccgctacaccctcgacgtcgacttcaaggacgtcgcatcgggcgggcccgacgcgctctccacccgggacaagaaggtcgaagcctgcaaggccgccaaggcgcgcctcgaggagaggttcaagaccggcaagaaca

SEQ ID NO: 8828 - DNA, 945 bp, Zea mays
tgttgcagacgatgtgtggcctacatctccatccactgcagtttcagcaatttaaaatgatctagttgaaatgcattattttgtccattgatgaacagagcagcaggaattgaccagccatccattggcaaccgaaccagatctttttttccaccttgtgcaacttgtgctgggctttaacatgctatgtattttgtacaaatactcacaacctggccctggacattttgatgtcgataccattaactaaaataaatagtttttcttcgatgtaaatgtccgtaaaatatttagttcctgaatttctttcttcctttctagtgtgactgtcccatctaatattctgaaggtgacatgtcattgttgggttgaaaatcacaaggggagagaaggaaaaaggcagggaatgggaggggaaagtacctaagccagctaggaagcaagcaggaccgacctgcgcctgtgcactgtggcttgccgtcgtcgtcactttgttgccggtgccgccaaaagtgaaccgtagctagctgacatcgatgattattgcaacggggggcgcgcgcaagaggcctacgtacatgggcgtttcgatttctcttgcggttacggatggatcgtcattattatattgctcaccatctgtggtccgctcgcacgtactggcttgtggatctggaccatatcgcctgtagttttccgtggaggtcaggttggttggttgtttggccaaggcgtcgcgcgtgatgtgtacgtactacgacgtacgtgtcgacgacggcgacgacaacgacggtgccggttcacacgctcgtcactgcaggacgagacgtcgacgacgtgatctgcacgcacaagagaccacaacaaacagatagccatcgtgcatgcgcgcccgcgtgaacaacttcactgctttgtcctatgtgctatggcccgatcgtttca

SEQ ID NO: 8829 - DNA, 908 bp, Zea mays
acagagacgtgtttttgtaagaaatcagggaccggctgcgccatgcccaagagctgatgaagacacgccatgtcgggtcatcgggaggtcttctttgtggtgggtgattgggtgtggttgcgattgcatcactgtcacgtggctgccattactgataggtgctcaggcaagctagccctaagttctatgggccgttccaggtgctggagaaaattggagaggtctcttatcgcttggagctgccccctcgttctcagattcttaatgtcttccatgtgcttttcttgaagaagtttgtgggtaatcctccaacagcagtacctcttttgcctcccatcaagcacggtcgggttctgccagtacctctcaaggtgcttcgttccagactgaatctaggagattgggatatcctggtacactggatgggtcatcctgcagctgctcaaacggacacgataaaccaccgggctaaacagccgtgcgtgaacactgaacagtgtggtcttcatcagcccaccataagcagagaaaaacaaagatcgcggattacgtacgtggagatgactcggataaccagtgggcgtgttgtgtcactggcatgtggcctgtcatctgtggtggtgtggcctgcctggccatacatgcacataccaaatgaacatgcgcgcaagtacagcaagtagccattctagcctctcctctgctctgcaggactgcagccaggacggagaggaccacgacaaaactgcgtggaatctttccgctcggttcggcggctgtacctgcagtaccgccgtgcgtctgggcagtatgctttgcttgccgctgtttgtttgcctactcctcctatcctaatcctaccgtcgtgtggtcggctgccgagtagaagtacaaagtaaacgcaagca

SEQ ID NO: 8830 - DNA, 510 bp, Zea mays
tgaagaaatttagcggggctaaccatttttgagcttggcctttccaatcggttccccacctggcattcagtttggttctcacatctggcgggaaatcatatgttaaccagacaggagcctacatagatgcatgcatttactcagctatcattcacagagtgacaaaattgtctcaagtattaaccgccatcggctatgaagacaaaggcataagaggtttgtacatgagctgataatccacctatgtaggataggatagttgacactgggcaaattgcaattaatcacgtgatggaatcaggtggaaaggcaaactgacctcagccacgatctctgcggatgtgacaccagtttcttctctcaattccctgaaggcagccgcccttggttcttcccctgcatctataccaccctgtaggcagattgttagtgggttagggatttctaggccttaggctatgcttagtactaattagcgggttgaaaagtacagaggatctcccaagatca

SEQ ID NO: 8831 - DNA, 527 bp, Zea mays
tgtgggccatatgtaatatctccactgtttgcaagtcatccgactacttcgcgattagtcaggcaggtcgcctcgtaacagccaactagacaaacgactcaattagtgtttcaggtcatccaaatcgtccgattagtcatcaattaggacaattagtcgtccgacttattctaaatccgaccaggatatgcctggcggctagggttttgtagtgggccataggcttctactttttcggcccatctactgaaacataaagcttcccctctcctctgcccctgtcgaaaccttgcctgcgcctgctgaaacccgacggctgccgccttccagtccagatcactggcgccggctccagcccaccggtggcatatccagcaccagtgacgagatgagctccttatctcaaggttccccttgctccccctttcctatctttcttatcagtatgtctgtaccgcttacctgctacatgttcttcatcttagagcttggtagtagtttgtactttgtagtagtgatcagtttca

SEQ ID NO: 8832 - DNA, 509 bp, Zea mays
tgctgctcgctgaggtcgaggagcttccccgaggcgaggaagttggcgccctccaccccactgcgcccgccgtgctgaacgccccgcacgcgccctcggccctgcatcttgacgccagtgacagcgcccttctcgcgccactcgaagagctggcagcagccgggccacgcctcctcctgcgaggccggagtagcggccggcgcgccttactcacgatcacgagccgctggacgacgtccccgtcggcgtgcacacccttgtccgtgaggtgcgcgtgcgcctccaactcctcccgcctgaggtcggagaaggccgtgccctcgcgttagccacaaggagatgggtctgctggatacggcttaacaaagttaagggactagattttgatttctagagtttgtagacctaacttgcagagagagacaagtttaaggcgcgacagtgtatctaactataaaaacttcatttcataccgcgcgtgttagttttctatttgcgaatcgagatca

SEQ ID NO: 8833 - DNA, 1077 bp, Zea mays
  unsure (1)..(1077): unsure at all n locations
tgctgtgctgaccggcctgcactgtactgtacggttggcgtgctactctaacagttactggtcctacaactcctactccctgttattagtgtataattttttttatggcgctcttgaaattttgctagaacgatttttttcctttctaaaacaagtggagaaccagtagaaaaaaatgtttccgctaaagaaaacatagatcatactgttatactactgatttttgatagaggtttctggtaaaaaaaaagatccatatatactggctgtgtttcactgtaccttgtagcaggagccgcatcccttgccgtccttgaacaatggctggtttccgcaggagcccatggacatgaaggggtactggttggtgtgcttgaagccgcacgcaccacctagcacaggacacgttccgtgagccacattgccacgacggagggagagggaagaaggggggaagacggagctaagagagagagagagagagatctcggaatggcggcgcatgctcaccgttgtcgtccgggccggcgccgttgggctggccgtaccagatagtttagaggtccaatcagtccttccaagaaatgctcttggcgcttctcatctgtgtccacttcctctgaggcgtagcgtgaaagctgagtgaagcgatcacggtactcactgacagtcatattcttcttcagcttcataattctctagggaatatgatgagcgcggaagttcacttggaactcctgtcaggttatggtatccgcattagggtgtgttgctgtgaaggcatcccaccaatcggacgcggctccctcgagtcaacccgaggcgtacaagaccttttcccggtcgttgcaataggtgatgtccaacttctttccgataaccttgagccagtcatcggcatccaaaggatcaaccacatgggagaacgttggcgggtgatgactcataaaagcccggtgtttgtctctagccgctggtgtgatctaatgatcctgcgcatgctattgagtgctagtgggtccacgaaacgggtcgtttcaaagggtcccctgcnanacaggaccangggtaccgaga

SEQ ID NO: 8834 - DNA, 469 bp, Zea mays
tgcggatcggataagcatggggggcgccaacggaaggactcacattcaccggatgccacttgaaaaacaaaatccagccagtggatttggtgagacgtatacgtcttggatttgtaggtgaaaagcaacagcagctagctagctgctagcctcctcgatcgacctgagggactaactagagacgacggaggacctcgctcccccttttataccatccttgagtgaggccgggggctcacttcgtgctcgagctccagctcagcagcaaggtgccaaggtagcaagctctcggtcgccactactgcaatggaaggcctgattccgttggtgtaccggaccatcgtggagtacaggaaggcgaggcaccaggtcgccatcgcaagccgcctgctgtacggcgaccaccagcagcagccgtgtggttcgtcggcgctcttccgcgtcgttgaccctgcagcaagcagcagca

SEQ ID NO: 8835 - DNA, 466 bp, Zea mays
tgaagcacacgtcgaactcgtcgtcaggcaatggaagaaggcaccaacgaatcagccgagctcccccctggcacaaccgccagtgtccacaacaaggcgctgtcggggaccagggaggaggtggagcgcggccgcgaggcggcggtgcaggcgtggctggcgtccatgccgctcggcgaggagctggagcggctccgcgccgagctagccgcggccaagacccgcctcgccgcgacggcggccgagataccgctgctcaagtcgcggatcgaggccacgaacgccgcggtcgccacgaggcaggaggcggcggcgagaaagaaggccgccgcggaggacctccgcctgcgcgtcgacggggcgcgcgccgagctccggcggctgcgcgcggaggtcgcggcgtcgaggggcgccaaggacgcgctggagcggcgggtgctcgtccggcgccaggccgcgcgggcgc

SEQ ID NO: 8836 - DNA, 848 bp, Zea mays
gactgatgggcgcaattcaggtcaaggcttcgtctgctcaagggacacggtctattctttcccgagcccagcctcgggcggggactgtagtcctaggcgaattcacgcctcgcccgagggcctcctcagcaacgggcacaccctcgactcgcctgaagcccagctcgtacaaggctttgttgtgaagcaaccatggccaaatcacctcaccaaccgaccgtatcgcaggcgcattcaatgcaaggatcgcctgacaccttatcctgacacgcgtgcctcagtcggcaaggtcgaagtgaccacagtcacttcgccctcccactgactgacctgacaggaaaacagcgccgctcgcccctctccgactgctgtgccacccgccagggtgaggctgacagcagtggcgactaacatgcttgcagtggaacaataggcgaaagatcaattggtattttgtcaaagccttccttgaaattacaagagataacggccactggacctgcagggtacaacaagtatatcacttcactatcacaagacaaacatgaggaaagttttaaacaaactattaaaatagaaaaccttattgctaaggcagaatgtttccaaacccgtgatgcttaattgcattgatcgatcaacatctgctgcagcaagcttatctgcaggatccaagtccttcagagtggccagtttcttaaggagggaactcctttcctgttgaacgcagatgtaaacaaagatgataagcttgctgcagtactccgtaaaacgccatatagtatgaccagatccagataatatttaccacacagcagattaattcctcatggcttggatctgaagca

SEQ ID NO: 8837 - DNA, 521 bp, Zea mays
tgaaaaaaaatgcatcaaattttgccatgacccaagccacaatctctatcaagtttggatcttatcaccagcacatatcactcgtgtgcaacagctaaaatgtgcttattgttttttgacatacatattttctctccagcattagagagtacagataatcacataatatgtacccatgccaatttattctccaagaatctaacttgtagtagcacataaggtcaaattttgttataatcacatccattttatatcatagccgtgttgtctacttactaataaattaaaggaactaaatttgaaactcttctgagatatgggccaaagatcaaattaatgtttagatattacgatcgcattgcacaccacatgtagtgggacacggacagtctcttaatatatgacacatgcatgtaccagagacgccacgcgaagagcttcttgtggaatttctggaaaaaaaatattgagataaataatagtagttctccatatgactcgtctacagcatggcagcagca

SEQ ID NO: 8838 - DNA, 745 bp, Zea mays
ttttatggggggtaggcctccccggggggacggaaggcttccaaaggtttcttcgggcaagacggacattggtcataaagtgcaaaggcagaagggagcttgactgcaagactcacccgtcgagcatagacgatagtcggctttagtgatctgacggtgccgagtggaagggccgtcgctcaacgtataaaagttactctagggataacaggctgatcttccccaagagtccacatcgacggtaaggtttggcacctcgatgtcggctcttcgccactgatgtcaggaatctctcccttgtctacactcttgctggaggtacacatgttgactcaactggaagacatttatttggattggatatttatagcattttagattgacattgtaacagtccacgttgcagcccacatgctttctttatatcttcagtcagtaaagaattgaggttttaatcacttatatcttgaccttttgtttactgacccgaattgcagaaaaatcttaaaacactgacattaatggaacacaaggacttgcagagtttgaaaagcacggcaagataggtctacagtatatattacacagtaaatgtgataatgataagctaagggcatgtttggatataagagctaattgttacttagctaaaactagcccaagtgcatccaaacagggctaataagtgggctatttttttagccaagccttcaactagtcgttacccaactagaagccaacctca

SEQ ID NO: 8839 - DNA, 540 bp, Zea mays
gagctcggtacccctgcagctcttgtacgctcgtcatatcaatttccacgagcggatcataactaagctgtgcccacagatgctgatccgcgagtaaaactagtggttactaaatttcacggatggcattttccctgattcaaatgacgggttctttctgctacataccagcaagccgacggaacagatcgtcaaaacccgggcatgagcgacgcagctcaagaagttggagtaggcgtactcgcgctcatcgtacgcgttcttggcgtcgtcgaagccgatgtgagaaaggtacgcgtcccgcagagccggcgtggatcccaggtcgacggcagaagacaagtcgtcgtcgtcgtcgtcgctcgtcgagtagacgttgtcgccgtggaaggcgaaccactcgagcgagggcgcgttgacccggagctcccgcacgcccaagcagcgcacgatctccagggaccgcagcgtctcgccgtcgatcctaatcgatctgaggaggttgcacccctggagactgaggacctccagcgcccggca

SEQ ID NO: 8840 - DNA, 551 bp, Zea mays
tgcaaaagacggaacaaggaacgtgcttagcaccagggtcggagagcagcgacagcgtctgcttgcgaagcggggggggagcgcgggacccgggttacctgagcgctcgaactggagcttcttcttgggcttctccgccgtcttcctcacggcctggtgcttggttcgagccatcgcggtgggcgcctcgcactgctctcgtggccgacggtttcgattcagaactctcgggacgggagggcgtgtcgacggtgagtctttttttttaagggggcaggagatggtgaaatgaaaagaggtgcagcgttattatggtgagcactgagcactgagcacactggtgtggtgtctgcgtgcgagtggccgagtgcctatcgatgtaacggctacctgccaacctggcgtgccgaacgtttgagtagtgggcccggaatgcagtgagagatgctttctttatcatcgtcctcccagccggtaaccagcattgagttaaaaaaattctttacatcttggatgtaaaaaataacttttacagcttctcacgtacacca

SEQ ID NO: 8841 - DNA, 452 bp, Zea mays
tgctagaaccggatgtgtgccacaacagttaaaatgcaatttttatggttaaaataatatatgtttagatgatatttcagctttagataactggttttgttagctaggcaattgaacaatgataatgtactgcttttgagaactcatctatagaaggaagcataaaaaataaatgacaatttaattttgttatcgtattgtagatcattgttaaagtaagaaaaaaatgaccaaatgtattatctttgttcatgtcactcatgtatcaatgtaaagttgcatctttattaaactaaaattttaccttacaggatcctcaagcgcctccaagacccagcattgcaagtatccctccatcataccagaagcctttaaatccttatattcgtcatccattcatcccgagagaagaaactgcaaaacaggaaaccggagaggggttcttcaccaca

SEQ ID NO: 8842 - DNA, 523 bp, Zea mays
tgatctcacaacagattagagaagaaaatgtatgcggttaatatgactatatgagccatttagcatgccacataaggatatgtttattgcgctcaacaacatagttgcataggtgccactggactgctacaaaagatgcatgctaatgaaggtcgaacaattttcagcttgtcaattaaaattaaaaagtgtaatcaacacatagcttaataaaatacatcaaaattaactagtgcctagagtgatggattaatagctctcttagaactcagtctggaaacctaaaaaaatcagatactcaacccatttagaacttgaacctttttttttaataaaagggccacttgacccggccttctttggaggccattgtaggaagcagggatcgagcctggccggcttgaacttttgaggcccaactcattatgtcgtaattcttaaaagtgacaactgacgacctagcctgactaggtggcacctatgcattcgccactacccctaattaagggttaggtaacacgca

SEQ ID NO: 8843 - DNA, 500 bp, Zea mays
tgctatcacagaaaatggtagggcattatcgacccatgtttttttttgaattgatcatttgttggtagcttatggtctactcgatcttgcacatatatatacagatatggttgctgctgcggtgctgtcggccaaccgaaacttcgaggggcgtgtgaaccctctcactcgggctaactaccttgcctcgccgcctctggttgttgcctatgctcttgccggcactgtaagtacattgttatttcttcttccacttggagttctattgctttgtggctggctgacacacacactacgtacggcaacggcaatcgcacaggttgacattgactttgagaaagagcccattggagttggaaagggtggtaaggaagttttcttgagggacatatggccttcaaaccaagagatcgatgaggttgtggagtccagcgtgcagactcacctgttcaagaaagtgtacgactcaatcatggaacgtaaccctaggtggaaccaga

SEQ ID NO: 8844 - DNA, 940 bp, Zea mays
gatgataccactgatatcggtcaaactgaacaaggagcccagaagaataaaataatgtgtagagcattaacggaatcctatagccaaaaatgttgttcattcatcacaaacattattaaagagtagaaaagaaggccgaccataccttatggcgtgcgatgtatgccaacacagaaagtgctagaagcagatataaacttcacacaacaccacctcacagatctacacagttcacacttagtataggagcatgacgtagaacatgcactgtagacgaaggcagggtcctgcctgggagcgccttcaaggatgtgtcggagctcgccggactctgtgcagccggcagatctcgtcagcgccgccgacgagcgcacccccgaccaggagctatggaagcgagtatctgcggccccgggcgttgaggattccctgcagtgtcatttatacttttagtgtgctgatcaaggcatatgcaaactgtggaatgctagataaggctatgatcatcttcaatgaaatgagagaccatggagtgaaacctcatgtggtgacctatatgacagtgattgctgccctctgcagaatcggtaagatggatgatgctatggaaaaatttaatcagatgattgatcaaggagtagtacctgataaatatgcataccattgcctgattcaaggtttttgtactcatggtagtttactgaaagccaaggaattgatttcggaaataatgaataatggcatgcgtcttgatattgttttcttcggttcgataattaacaacctttgcaaactgggaagggtaatggacgcacaaaatatatttgacttaactgtaaatgttggtctgcatcctgatgctgtggtgtataatatgctgatggatgggtactgtcttgttggcaagatggagaaagcattaagagtatgtgatgatatg

SEQ ID NO: 8845 - DNA, 505 bp, Zea mays
tgcggtgcgctgaattcgatttgttggcatatctttaatttcgaccccatcgatctctccttcaattcaatcatgtgtatgttcaccacttgtacagtgtacgtcgtctttggtttgcttgcattttgcgttgggtccctaaccctaactagaccttgcaaaggctttcgaagcccatgtactgatgccgctccaccctgtggactatgtttgagatgcctacccctcctgcaaagagccagcagagatgcatggttttcaaacaaaagctgcagctcttattgttggtgatcgacttcaacagatgaaggcagggcatgcatggacgatcgatcgatcgatcgatgctgtacgtacgtacgtaccgagcgtaagcgcgctgacgaagatcatggacgccaggatgaagatgatgagcgacgcgcggcccagccacgcgatcagcttcctcacgcagtgctgccccgtgatggcggccacgaacgccacgcccgtgaagtaagca

SEQ ID NO: 8846 - DNA, 449 bp, Zea mays
tgctccctcagctcgcgcgcccctggtccgagcgttcctgcgcccgggacttgctcctccaccatcgcacgcttgggcgctgcccctggtggccgcctgctctccctacgcgtgcccaatctccctgagtcgtgcgcgccatggtgcttgccgtcactttgccagaccgtgtccaacctccttcccatggcagttcttcctgctcgacggcgcccatatcctctgttccaccctcagctcggtttcgagctcctttctcactgcgcgtgctgcactcgggctcggacctagctcgacgccctccctgctcgtcccagttcctctctgctcggccctggtcaccgtgcttagtgcctgctcacatcgtgcctgctcgcattgtggtctcccaactcgtcagcacttgttcaagtcgtctcgactcgcttggccgtggtctcgtcccggct

SEQ ID NO: 8847 - DNA, 538 bp, Zea mays
attcgagctcggtacccctgtttgtgtccaatggagtatccaaggttgaagtgccagaggagctgcttgaacatgttgccacacccaacaagtgttcatcagccttctgaccatttggtctggaaccattccagatatctccattgcagagctctgagagcggacgagacctatccttcttcctggggatcccgcaaggttggtcctgatgtgcagcagcatgcttcctctttgtggtggcctgagagcgcacaattcttctggcctgcccaacattaggcagatcattatacttgggagcaaagattgcggcagcattagacaggtccattgtggggaccgtcttggatccgatgtccctgagatccctcatacggcaggagccttgaggcgtatcgtcctcggagtcatagggcgtcttgcgcttcctcttggaccgcggcggcggcagaggcggctggatggctggagaaggatcctttggtgcagcatctttgacttgtccgttgggcattccaactttgggactaggtgagca

SEQ ID NO: 8848 - DNA, 517 bp, Zea mays
tggtacagtggtactcgctgcctcttgttgccactagtccactacacagctctgatgcgacatgggcgtacttgtggaagcatttcatctttctagccctacttttaccgcaatgcctgcaaatcatttctacttctttggtgcgcagcagcgctaaagatgccatagattgtttggacctcgggagtcctgcccactgcattttgtttggtcgggttttcctgagattctactctaccgtggtcgggttccgtgttgacggcgagcagagccgctcgcgggtgtccaagtgctgccaagctgtgttaaagaaaggaaccgcacatgttgacggggaccaaattttcttttttcccgtccgttttttcttagccaagctgaaccaccctatgcgagatgtccttttcttccgcagcagatgtctagagcacgcgtgctggtatttgtttgggtgacctcgttgaacgcgttagttttagccttttagctgtcaaattagcctgacagagaaggatca

SEQ ID NO: 8849 - DNA, 530 bp, Zea mays
acccccgcacataattgtacaccatggaatcatgggtaaattctatagaaggtgggggaaaaagcatacaatatgtttaagggaacacaattgtacattacagtgcaccagaatatatatcgttacctgatttaaagtatttactatttggaaagaaaaccatcttactagcagatgggaatgtgcaaaatgtggcctatcaattttatttgtaaaatctcagtggatgctcaacccgcagaaacaaggcacaagattattactgatgggcaacaatgttcctatcatctctatatattcaagaaaagtattgagtgtgaagtcccagtgattaaatggtcatgtcagtagaagcgcagcagactgacctcaccattttgggcatggtaagccctagaggctactcgactatttttcaaatatgcaaaatgaagagctgcagagtgcaggcaaccaaaatactaaaatgcagggaaacaagagattgcagttagcccagtcacctttgatctccaggacaggtccttcaa

SEQ ID NO: 8850 - DNA, 488 bp, Zea mays
tggcaagttgctcctttttcgtccccgtctctcctctgtttttttataggagtatgcaattatactactattgcatgccgagacaagacgaggtccccgttaacaggagaatctgtacgtttcctacccgaaacaaatctccggtctgcaaatctgatgagtcatccatccatccttctgcgtcctgttctattcagcggcgcgccagccatggccatgctcatcaccatattcggacatcggacgacgaaagtccaacggcggagcgcccttctccaggtgaaatatattcttttgctttttgctgtcgctagcggacgcgcacgctacagacgagtcgacgcctcgacggacgcttttggcagggagccaggcaggcaccccatgccagtgccagagccatatgctggcagatgcagcgcgagagagatgcccaagtccaaccggtcagccccggtgcatgcagaaagcacggatgcagcattgca

SEQ ID NO: 8851 - DNA, 1034 bp, Zea mays
ggacgcccaccgggacgccgatgaagttcggcgactgcaccgcaccgaccgggtcaaaagcaagcaagcaaacggaatcgacaggaccagacgacccagatggtttttctgctaaccgcgatgaagaggtccctgccgagcagcccgtacgccatccagagcgcgctggacaggaaggagaagagcgagagggagaacggcatgaactccacgctcttcgtcgcgatgactcgcttctgcatgcagtagcgatcgacagggggtcgtcgttgggctccagccagagattttagtgccagcagatgctgtgaaataaagtgcatgggaaatcagcaggggggaggggggttgggcgatcgatagatactgacagcggccaccattggagaggtgtacatggacacggaagccaccagcccgacgctgcccacgaacgccttgcgcgagcggtgcgtgcgcgccgcgaagctcgacaaggccgccgtcaggccgaacagcgccagggcaggaagcaccagtgtatctgtcaatgttcacttctgtttgaagtgcgcgagaccagtgctttactttcctgacccgtctgagtatcggtttagcaacttcaggtactgggctttgttgtgaacaaatagtgcaatgtaactgaacttgaacctaattgaatttctattagattggatggtcatattgcaaccatgacatgttggtctccttgaattttactgttacatggatgcatcgagcaaattggtttgtgttgatacttgatagcatgcgtatgaagagcaagactgcaagggcatgtagcatcattgcattttaaccctgcccttgcctgtcttatccgagctgttctaaaacaagctatttttcaaggataatgccgccggatagtagagagagtaaattctagtatcaatgtggttctttttttttttgctgttgctgctggatggtatattttagtgtcaaagcggtctttttttggtccttggctcggagtttaggcttccaggaatttgaacttgtca

SEQ ID NO: 8852 - DNA, 459 bp, Zea mays
tgcacattatatcatttatgtaacacgtaacgatagatgtcctgtatttttcacctttatcaatgatacaccaccttcatataagctatgtctttggacagaactatttagaactgtgaaacaaaactataaacatgcaatctgtacatatccatggtaacggataccttaaattcaatttgatacttgagatcacttcattctttatacctacaaccccaaacaaagccatttaaaacaacaatacatctcaatgtaaatgtacggaaatcatcattcatttcggggtaattttcaaacatcgttttcattgccaggctaaccataaaaaatcgctttcaaacagcacatgaaatggacagaacctacggtggatactaagagaacataagctttacccttaatgatatgaccacaaacagtttcatgcaccagaataaagataatggacacatttca

SEQ ID NO: 8853 - DNA, 483 bp, Zea mays
tgtagacaaatgcgacactaggagttagttgagtaggaaataaaaaagaatcgaaaagaagtgatataacatatgatagttggtataaagttaatatagagagtaaacatgactatagatgattgtgatatagaatagagaattttaatgacaaggccaaaataattttgtcaggatagaaatttaggaagtgtttagatagagacgacgaaggatgaaaaggaatgagatgagattattttaacttgacccacgtttggtttggaggtccaagttagattcaaacaatatttttaaaaaatagtggatgaggctatcacttaaaaaataagggacatcgtcagcccaagattgatcttatctcgatcccacgttcacaccgaaccaaacatgtcagagtaatataagtgcggatagccagtctttctctagtctctactacgactacgccaggtgtctaggtcgctgccgccctacgcctac

SEQ ID NO: 8854 - DNA, 1011 bp, Zea mays
gcagaccttggcttggcagatgcctacattaacggttatttctcatttgtagacaagagagaaggtcttctaaatcttttcctggttagatcttacaatctaaatagtcaagtcaaacaattggcacatgttttttagggatcaaattggcacatgtcacatgtgcatagatacagtactagttaattgtacatgtatagtatcgtttaatgtttacttttggattccatccatgaatcattttgctacagattctcattgcgaacagggacgcaaacaagagtagtagcagcgctgctggtaaaaggttagtcccctccaaatttctccatttttaaaattaaaatcaagcagtgtatatgaagtctagtactaatttctaccatcaacagctaagtatttccttcacaaaaactgctaagtaatcatgtacacatgtaatttgtatggtcaggggttggtggacacccctgctattgacagaaggcaagttggaacaagttattggtttgctaataatcatcagccattaagcacatgtaccaagtttttttgttggttcttattgagtagtatatttcaacagaagcataatgctatggagcacggtgggcggatgtctcgttctcagaggaatgctgcacttgaggtgtgaacttggttctagtattttcgtttcccatcatggttttcctctatccaatgtatctgttcttgacttcttggtaaaagattcactatatttttgtggttaatttatttggctcatttacactaagttttgtaatttgcccctttcagacacctagcagctttatatatcgcagaaatgagcaagaacaacggcgcggcaggggccgtaatgctttccatgatggatctgattgtcatatctcatcgtctgcaaatgctttccatgatcgatctgactgtcatatctcatcatctgcaaatgctttccatgataaatctgactgccatatcccatcaactgcacaaaaagaccgggca

SEQ ID NO: 8855 - DNA, 503 bp, Zea mays
tgaggaagtcgcaagaagccgaaccctttcttcctgactcgcaatggaacctggagcacgggatgactgccggcgggaagaagcgcaggccggagcagcagctcgaaggagaccggcgcacaaaggcacgcaaacactcggcacgggagccgcttcccctggacttgaacctgtccgtgtccgatgaccataccgacgccgtagacgacagcggcggcgagggatcacggaactcgtccagtgacctgaccgtggagcacgagcaggagtacgtgcagcccgctcactccggcagatgctcggcggcggcgccaccgaccgtgtccgaactcatcaaagctgtggacggagtggtcgtgttcaagccaccggtgagcttggagccactgaagcggagcgtctccgacttggtggtgccggcggcgaagttgggggaaatcacggtcggcgggtggcctgttcacgtcgacgacggcttgctgggcaggctagccgcccgggca

SEQ ID NO: 8856 - DNA, 503 bp, Zea mays
tgatgcaaactgcaaatggctaacaacattatccttttgcaaggaaattacatcattgcttctgagaaaaactactgatgactgaaacgcatggcttataggttgttttaagtccttgtcacagtgtaggaatctaatccctctctattcctgcatagcacatagccacataccattcaatcccatgtgcttcttggcttgggaaaaaaaaatccgctgttaaccctccccttctctttcttaaaaaagttactccataagtacagcaacatacctcataaactccttttctgttgttttgggaagcctgaagagtgtgttatgcttgactctgatgatctgatccaagagagtctgttagaacttgtagagtgacatgcaaactgcaattatcctgtgagagcacaataacattttatcagagtatgaaatataagtctttttttgctgcacttctgattccgctgcatttcttttgcctctttgttttaggcaattactga

SEQ ID NO: 8857 - DNA, 481 bp, Zea mays
tgcgtccggcaccctcgatcacctgaagtcgccgcctttcgcgcgtccggctgcccggaaccccgcctcctatccatgggatcgattcggaggttagggtttgctctcccactccgtccgtcttggttcgtcgtcaaggcgtggtttttacggctcgcaagattggattaccgaattagtttaggctagggtgggtttcttcatctgaactctgatgtgtccattgtggtggtaagagatgtccatttcattagattgaggtagctatcaccactgttatatgattgctcgtccgcatgatttcattggatacaagagctaattgttaactagctaaaattagttctaagtaggtgggctaacttttttagccaagccttcaactagtcgttagccaaccatagctaatttgagctatttcttggcccaattagtaactagccctagatcacccaaacaggcccttatgtcaaattgttca

SEQ ID NO: 8858 - DNA, 525 bp, Zea mays
tgccgacgtgcaggaaaagggaagaccgggagagggaagagcccccgatcaaatctcgcccgcgctgtcagtctcagcttcctttccaacgctctgcttcctttctctcccgccgcttcccgtgcgcctcgtgagtcgtcgtgatacaaggtgtaggtaaggatcgatcgccgattagccgccgcacctatcgcctctcccgcgcggcccgcccacccccatggagtcgtggcggaggcggacgctgctcaaggtcatcgtcctcggcgacagcgggtcagcacgcttaattcaccttcgcttaacattaattctcgcccctccgtttctcttctatctgttcccggttgcggtttgcttaacgtcgtcgtcggcttcgcatggattggtgtcatcttgtggtttggcgagtgcagggtcggcaagacgtcgctgatgaatcagtatccttcatctggtcacattcatgactaatttagttaaccggccggccggtgtttattttgcctttgcttcatccgttca

SEQ ID NO: 8859 - DNA, 537 bp, Zea mays
tgcagcccctattttcttcgggcagcgtcagcgtccatggaaccaggtcgcctagtgcggcttgcgcctgtcgtagacggcacgcacgacagccgcccaagactcatcagatttctcttcttccatctcatccccatccccatcccctatgctatgcatcagagaggaggaacattgtagctaggctaccaaataaatacttctcaaagtcttttgacttttgatataaatccatggttttgacttttgagatggcatagcaacaaataaaaaccattgccaggcaagcttacgtgctggtctggcggtaaaatatattcagaactagacagcaaaaagaaaacactggaaatgccgtgctgcgtcgtggagcaccttgcatgtttctggctatttttatttcaagcatgccttcctgaatcttttgaacttgaggacgcaaatgaaatcattcacatcctctcagatccgcacagtaaataatacattacaagagtgttgatccaacatggaagagaagatgcattgggcctgtca

SEQ ID NO: 8860 - DNA, 491 bp, Zea mays
tgcagacatgaaaagttattccattactcacaaacctgaactgtgctgagttgaaattgtggtctaagtaaatcaacaaacgtagcccccaaatttgaatccagaacattggattgagtaacacagcaatccaaatggacattcatctgaaaagacatgatagactaatagagacataataaactaatagaggttcctaatactttccaagcaagagcattactgcatcccccaagaaaatcaagttgaatggtggacacaatgcacaagaaaagcttagagagcatctaacaaatcaaaagcgcagtcaagttttaggcacgtggatagttattttccatgcactccaattcaaggtcaaatcttttaatgcctcttcccatgtcaacttcagccttcccctgcctctcttccattactaccgtgccttaggatctcactgtgcactgatgcctctgaaggtatacgttaatcatgcccaaactatctca

SEQ ID NO: 8861 - DNA, 514 bp, Zea mays
tgctcggctactgccggcggagaggtgagctcctcttggtctatgaatacatgccgaacggcagcctcgacaagtatctgcacgaccacgaaaaaccggccttggattgggaccaaaggttcaagataatcaaagacgtagcgtcaggcctgctgtatctccacgaagactgggagaaggtcgtcgtccaccgggacatcaaggccaggccagcaatgtgctcctcgacgcggagatgagtggccggctgggcgacttcgggctctcaaggatgtacgaccatggcacggatccgagcaccacccatgtggtcggcacgatcgggtacctagccccggagctcgggcacagagccaaggcggcaccagccactgacgtgttcgcgttcggcgtgttccttctcgaggtcacgtgcgggaggccgcccgtcggggaggacgacgctcaagggagccaggccgtgcttgtcgactgggtgcttcaccactggcgcaacggctccatcacggaagca

SEQ ID NO: 8862 - DNA, 303 bp, Zea mays
tggatggttgagtgcagcccgcacaggagagtggcgcttgtgggctgtggccacgaaagagtactggtcgggtagagagatagtcattagattagatctattaagagatcaaatctagattgttttaatttagagagatcaagggagaactctctgattcttttgaggtgcacttttgcacacaaatcttgttgattatgcaagattagtacgttaatattattcctctctttgttgatcaattgtgtttttggttttgattatagattgaatctttgttttcaattattcttgatgttttga

SEQ ID NO: 8863 - DNA, 1031 bp, Zea mays
caggatcccccattaaatttttttccatcttccttacgtggaggaggtaagctgtgagcctagtctcgttgcagctacattctccgcagacctgcttgataatcagctgggagtcccccttcacgaggagctggcggatccctagggatagggctgcagacaagctgaaaatcagtgcttcatactctgccatgttgttggtagcattgaactcaaggtgcaccgtatacttcactttatctccgcttgggtcaatgaggaccactccagcaccgccaccctgctggcgggcggatccgttgaagaagagcgtccagtggggctcggtgaagaccggagcctcgggctccgcaagtgtggggtccgaatcgggatccggaccccaggagcgctcgaggaaggggtccattccacgatgaagttagccaggaccaggctcttgacagcatggtgaggcaggaagtccagttggaactcagcaagctccgcagctgcggggaccagctcaccgacgtcgtatacaccgacaaaggtaaggtcttttgcctcaccaagtgcggggacgtgcatgtgctccgtcttcctgagcgccggcgccggaagcctgccaacgctgatgaagcaggatcctcggagccagagttctctgttctccagtcaccacaacctaatgagcgcacaattacattccgcccactgcgttggcaacatcagcgcaattttcggatgatgcgctatgaacaggcccggccaagagaccaggatctaactattccactgagggtgaccttctgtgcagagacactcatcccatataagaaagttccacctgaatcgcaaggaccacacctaaatgcgccggccactgttgagcccctgttgtctgaggccaacctcccgttcaaccctgccactgtctttgctccaccttatgacactgtctcgtcgttcactagtgcgaagaacttggtgttctgtgagggcaatctgtaccaagtttggaggaacgcaagctgcactgttactttgca

SEQ ID NO: 8864 - DNA, 537 bp, Zea mays
cgagctcggtaccctgttcagaccccaatatacactctgtaaaaacatttctttataactagaaccatatattcagcatgcgccaagcactgcctccgtctggtgaaaaaaacgactatcgactccggagcatggcatgatccgttatttcccgtatcagtaaaaagattttactacttatttcgtgaggtggaataaaaaaatgcagaatccaatctcctgtacggctgtattgatggcccttctcctgatactgataccgcacaagttacaacttcgacctagctaactctgtctctagcaaccgtgcatacatgtctgagatctcttttgcaaagtatgctttggcttgcggcctcttgacctacaggtacagaagcgttgaggtggagtgtcagcaggtcagtgatttggtatcggggtcgcctctaacagagcaaatgatgtttaccttgaatgttggggtgagaaggccattatccaatgtgaatggctcagcaacaagagtaaccgctttagcaaactcgaaacctctca

SEQ ID NO: 8865 - DNA, 453 bp, Zea mays
tgagcaaaactttattcacggagatcccgaaggtgtgatcacatggattgagggtgaaatagaacctttcgatgagtcctaaccagaatagtagacttttgtgcctgtgtgggtgctcaaggggctctatcattgctcgaaaaggctggctgtgatcatgctaaggctataattcagccagaattcttagtttcagtaaatgatattaaagaaccttcaggcgaagctaccgcctttcgtgggaaattttattctcaagtgtggatgaacggcggcagagagatagcatacgaagctatcaggcaaagtgaagaagaatctcatcttgcttcaggggaagcaagaaaagctgaagaagtcgcagaacgcaaaaggcgtataggtgtgtttgtcatattttaacttcataaatgttttagcttcatatctgacataaatttatatttttgtgca

SEQ ID NO: 8866 - DNA, 499 bp, Zea mays
tgccaacgccgcagatagtcgaagccgccgtcgctcgctgcccctcagacggcatcgcgctctccttcttcctgtggtgtgcccgccgccccggctatttccacccgccttcctccttcgaccgcctcctccccgccgcctcccgcctcgcctctcgcctcggcactgccaacaagcttatccgcgagctccaggccctcggcgtccacgtcaagccccagactttcctgctcctgctcaggctctactggcgcggggggctctaccctatcgtactcgatctgttctatcaaatgcgcctttggggattccaacccaatgccttcgcctgcaatgtcgtcctcgacgtccagctcaggacaggccatctcgacgcagcgcgacacacgttgcagtactacccggcacccaattacctcacctacgccattgtgctcactcatctctgcagggctgggggctggtcaggagcccggagttgttttattgaaatgctaca

SEQ ID NO: 8867 - DNA, 504 bp, Zea mays
tgcgcagtacaatggcaagttcctcggcgtggtgagggaagctcagaaggcagtgaagctcccaaatgtcaagtacgttgatgccatggggctgcccatcgcgagcgaccacacgcatctcaccacggaggctcaagtccagctcggcaacaaactagccaagtcgtatttggaaacgctgtaattttcaaataccggtatgcctaccaaaaacaaggcattcccccacgatttggaaacggacagagcaagcaatatgtacactcaaattacgatgctgcgttgagattaatattttccgtgctattgaaaccgccctcgtgttaaattgttagtcagtgcactagttaatcggcaaaagtcacacaaccttaaatacaatctccatggttgtagaggataaaatcatcgctttatttgagttttctattaacatgtcatccactagcagtcagaaacccgtgcattcactattggcgaacacggccaggcccatccgttaat

SEQ ID NO: 8868 - DNA, 514 bp, Zea mays
tgccgtgtcctgcacagccgccgcttccgacgcagcaaaggcgaacgcgaagcagcaagcaatcaagatcgatggggcggtcgccctgctgcgagaaggcgcacaccaacaggggcgcgtggaccaaggaggaggacgagcgcctggtggcctacatccgcgcgcacggcgaagggtgctggcggtcgctgcccaaggcggcgggcctgctgcggtgcggcaagagctgccggctgcggtggatcaactacctccggcccgacctgaagcgcggcaacttcaccgccgacgaggacgacctcatcgtcaagctgcacagcctcctcgggaacaagtacgtgcgcgacgcctccgccgctgctctgctccgtaccgtagtgcactgcacgcggacatgcctgcctctagaagtctagaggctggttggttgcctgccttgccttcgtcggcctcgacgccacccaaccaaaccaagctgaacgaacgtccggtccgattgcctctgccctctgca

SEQ ID NO: 8869 - DNA, 559 bp, Zea mays
cgactctagagggatccccctggtgccgggcgcagaatttacgttcacgcacaggcggcttgtgtgcgtctttgctcgcgccgcatcccactcccaccaccggcaccggcaccggcaccggcacaggcacaggcacaggcgactcgtagcaaatatgtcttctgcgttctgcgcccgtgccggtgaatgctcacgtcacgtggggacgttttctctccatccgcatttcacaacaccaccgactcacatacggtacccataaaaatctgtatttacaccaggagctagatccattccggcacggcaccctcacagccacgcatgggagctccattcaactttttttttaaaaaaaaacaaaaaaggcgttttcttcacgccacgcaccttaagcaacgtgaccgacaagtgttggccgcgtgcaccacccccgcggtggaatgtaatgtacggtggctccgacgagcactgctctgagaatggagtgccggagatgctgctaccgtgccgtgcctctctgctggttgccatctctgccgcaccgcagcccgcaggggga

SEQ ID NO: 8870 - DNA, 473 bp, Zea mays
tgctcgacgaaattcctcggcaagaatactcgtggtggccacggcaggacttttttacttcctcggtcgtgggtcgtccgacggacgaattctccatgcgcgtggactaatccgagctcacgtgtcctttatgcgcaggtgggctggcggaggaggtggacgagaagatcctgcacgccgcgttcgtgccctttggtgaggtcaaggacgtcaagacgccgctcgatcagtccacgcagaagcaccgctccttcggcttcgtcaccttcctggagcgcgaggacgccgccgctgccatggacaacatggacggcgccgagctcttcggccgcgtgcttaccgtcaactacgccttccccgagcgcatcaagggaggggagcagggatgggctgcccagccaagtgagccttccgtttcctctcttccgccgtcttcggtttgctgctacatttggtcgtgccctgccttagca

SEQ ID NO: 8871 - DNA, 545 bp, Zea mays
gcttacaattccgcagagaacccacagacccacgatcacctgagtgaacacgcaaaagaatctcaaactagtgaccattatgatatgaaaatgaaataaatgttcagcagatgttaagagcacaaacatacacccaaaaacttcttcagatcatgccccattgcgatctcacggaacaagtgaagcgctctgttgatgtcattccgtaatgcccgtgaaacattcacaacaaggtcttcagatacctgcactagtggaatatccggtggactcctgcagaggcaacacatggacgcaaataagatggatttctacttaaaatggaacatgttgaggatcatcctatgtcccaatgcaatactcacttcttgatgaacgtggttgctttggaccacaggaataaggtggcaagcacaccaatcagtacatgggatatcagggtcaggaggtggtaatcaagcacttcgaacagaacccagatgacagttgcgccacctattacaacagcagaagttttcttgtctttccataacagaacgtcagca

SEQ ID NO: 8872 - DNA, 508 bp, Zea mays
tgtcatcttaattattagaaccgataccgatcgattggtactcaacatagtcgttagtactataattaatgtgtagtattaggaccgcctccagatgaatcttattaggctagctaaactacaactagctggcttctaaatatacggagatacatgaagtagctgcagcatctgacagccgtacgtggcaattggcaacttggcaagaacagcacaaacccacgtgagacagctcggaccaaccatgcatgccctttcacgatacccggaaacttgacgcacttgtcggtacagtagcacaaatttcctcaaaaaaacaatttttttttttgacgaggcgccgcccaaccatcatcttagaaagaacgaaagctacccaaccatcatcttagaaagataataatatttcttttgttttggcgttagacatctcaaccgaaaaggtagaggccggtccaagtagctcttggaaatcgttactccgcaacctcttctgtttttgtcggca

SEQ ID NO: 8873 - DNA, 540 bp, Zea mays
tgcttggaatggtgccgcaccgtacgtgcgatttagacatgtcacctactacacacatgcatgcatgcatgcttgcataactctaagcctctactacaagtctacaagctaacaacccaacgccaaacatggagcgcggacatcccgcatgattcagtctctgtgttaatttctttgtgtttgatacggtgtttaatttcttcttcatagctgtaccaacttcgttgcacagcgaaccagatcgtacccgtgtcgtgttcgttaatgaatgaatgaatgaatgaaccgagacgaagaacgcacctcatcggtcgtcgccacctgaccgccgggatgggctgctgccgctgccatggtcctcccgccggaatctgttcatcgagagaaggaactggaatgagaatcatcacaaggcagtacaacgttgcccgcgctacgtacaaaagggaagctctgctcagcagccagcggatcatgcggtggttctgcatctactactgggacttcacccaagctaccaacaaactgcatgcgcactca

SEQ ID NO: 8874 - DNA, 519 bp, Zea mays
ctggtacccctgcgagtgtggcgacgattcctgagccaagatatcttgttgcgatcgatcagttgcctatgcctctcctcttccgactcccacccctctctctcacccccaccaggccaccaccatcatgcctcctcctttcatggcagagacgcagacgcaacagcgagacaggaacagcatcatggccaaccagaatgctccatcgctctctccatcccctcgacagagacggagagatggggttagaaagaggggcagggcaaggcaacaacatgctattgcaatagcatagggacactgcagctagtgctagtacgtacgtatctgactttgcttgtactaccatgcaaatcaagcaagcaacgttcgtttgttcatgcgaatttgtgatgatgatgatgatgctctccttcaaggcgggcacgaggtgtggtgtgaccgatccatcacatcaatggctgcacaggtcggagagctccttcctgccctcgacaatgtcgtccaggaagtcgtcca

SEQ ID NO: 8875 - DNA, 521 bp, Zea mays
tgtttacgaacctaagtacatatgtctgccagctacgagtattttttattccaaaaaatatgatagaataattctcagggtactctcattttctcccattactatggctataattgtctatattagaattttgtgctggagcgtacaaaaatgttagcctacccaacaatgcaagccatgatgacaatcacttatccgccttggaaaatcctatgttactgctattgatttgaaggttcaagacaggagttcaactgtatttaaccttttcctttaaattattgaaatgtgtgaaacactcaataagtcaacaactcatcatgaaaaataactagtaaagtcatatgtgttttttccctacaagtatagatatttacaatatacggggaaacatagacaaggcctgaatcgcataactgagaggacatatttaatgcataagcatacccttcagtttcaactttatcagacaatccatacagagggctgttgggctcaaggggagaatcacaagagtcatt

SEQ ID NO: 8876 - DNA, 728 bp, Zea mays
tgctcctgccgtcgccgtggctgaaatccgaatggcaatcccagcagaagcatcaaactgagcagcatgatcaaaggcggaactcggaacggctgctatgtatgattcgagacgtacgtacgtgatgggttatgttgcgacgttatgaagcgtgccacggtctgcaagaggcgaagagcagcaggtgcaggtcgcggggtgcgtccgatgcgatcccgatctgctagctgccgcacgtcaaatcgagaatggatctggggtggggggtcggtcttcggagtaacgcgacgatcgatgcatggcacgagagcggggggagacgagatggccgcgcgcgcgggcgcagtatacgtaccacgaacgcgtagccggtgacggtggcccaggagttgccgagcgtggcgccggcgaggtggacgtcgccgagctggcccgagaacatcaccgacaccagcgggatgccgtagtaggccatgctggtcagcaccatcggcaccgcgaaccccagggatcaacagaaatggatgagtgtactgtgtgtacagactacagagcagacgaaaacctgaacaagagtaagtatcacttgaagcaaatttaacctcttaacgcatggggaaggagacttccatatatttctccatcccaaacaccacgtggatgtcaataaggcatagggtcgggttcctatgaatttctttcaaaaatcgtcctgtccggaggagagc

SEQ ID NO: 8877 - DNA, 462 bp, Zea mays
tgcgattctgcatgcatgcatgcaagcatcggcaaacgttaacgccatttcttggatcatatgcaggaagcagtatgagtgatgcgtcagcatcgttacactgagtttccatacgtagcgattgcacgtgttttcatctctaacccgttctcttggattggattctcagtatcccaaagaccacaatgttttttttaagaaatccggagtcaaacatcaaaatgtttcttttttccaatccgatgtcaccaaaacgtttcattatttgcatcttcaggtttgggcgatcgctgattccaaacgccaaggatatcttggattctacgagttcatgactgccatgcaggtttgtacagtatacattgatcaggttcttcttcagtctgatctccggcctacaacatggactttttttttctcttctatttgtacattaaaccggatagcaatgtgcaggggaac

SEQ ID NO: 8878 - DNA, 440 bp, Zea mays
tgccaactcagatgtacatggcactggtaaggcataattccaagtttcgctgatatttattttggttcctgcagtgtaatgattgaacttggcttttgcaatgcagctatataccatcacaactctaattcttaccgtacagacgatatactatagccacatctaccatcgtcttgaagcaaaaaaatccagggcagctagcaaggtggttgctcctagtcatgcagataattatgttggcacccttttcttatgaaatttgttctgggtcttaacaaattcatgtatctgttatgggctagatcggtgagggattggataggggtatcgatgtgcaggaacgtcggtcaggggcccatgcccacggccgagcaagagggtttctcccttctaattattgactacattatttctcatctattgattacataaataggcca

SEQ ID NO: 8879 - DNA, 910 bp, Zea mays
ctctagaggacccccctgttttttttttcttttcttgagagagccgattccgtaaaaattattatccaaaaatttaggcttttatacaagctctccattgaaaaaaaaccaaaagctgctccaaacatatcccagatcctatagtttgatgcgaatcactcgaccactccactaagggtgaaaaagggaggagaaaccgtgctttcagtaagacaaaacacgcaccgagaagaaaggaggcgaaaaaaagaggcccagatctttcgtcgagatcaaaaggatataaaggcaggatatccggtgccaaacgagctggctggctagctagctagctagctagccaggggccagggcacgccaaaaaattggtcatggaaatatggcctttcgatctctctcttgcaaattaaagccggtgtccaatccaaagacaaagtacaaaaagaaaaaggaaaggaatatggccagacaggaaggcagctgttcaatcttggccatgtccataatgaattgattcccatgcatggcgtcctgatcatcgcaattcgcactactctatgctgactatgcatgctcgacacgaaaggaacgtacatgcaaagttaggagagtacacactacacactagacatgtagaccagaccagcgcatctccatgcatcacttggcatttgagagaacctgagtacctgactgaactgaagtactaaacaataacatgatctgagcaaaaggtgtcagctaggtagatgcctcgatcctagacacttttaatttgatccttttgctttagagtctttctgttgctaattaatttgagctgcaatcttattgtttttccaaaaaaaaatcattaccacagtagcaacgaaattacaaattgttggtgatatcattaaccatagtgcat

SEQ ID NO: 8880 - DNA, 518 bp, Zea mays
tgccttgtctggagtaacatgctggaggacagtggcgatcaaaggctcgtaatggtcagcaccagcaccacaccatgctgcaagtgaaaaaaaaaattgtacagtctacttaagcatgaccgtgtcactaaataaaaatacaggaatagagactgatttgcattctacagattatatgcatttgctgatgggggagcacggccatgtttgcatctgaaaacacacctgttcctttcatgaaaagaaaaatcggtggctcgcaaacttctcctcgaggactgtgtgggaggaagaacacacagttatcctcgtcaaccattgcatccgctccatgggcttgcacctatcaatgcacaaagaaaacggcccaagatcataaattacaaatgctatttcagctatatcaaatagagataaactagtagcaacatatcatatatgttcaaatacttaccacgtaaacttctctcttgaattcagtagctaggcattcaatggcaatatcatcgccaaatgca

SEQ ID NO: 8881 - DNA, 488 bp, Zea mays
tggcggcgggcagcacggacatggccgccgccgcccaccggtcgcttcatgcaggcggtggaggccagcgtggcggcgcctagcggcagcgtcgtgtccggggcgcgaaccgtgggcgggttgcgccaccgcgggagctgcccggcgacgagcaggttctgcagcaggggccccgcctccatgacggcggccagcaggcggcccctctgcggcaggggccgcttgccggcgagcgtctcgagcacggcgtcggccgccggcgccgacccgcggccgcaggctccgggctggcagtggcgctgctgctgcggcttgggcggcggcgcggggggcgtggcggggctgagcttgcagcgccggtcggcggaggtgacggggtcgaagaaggggtcggcgggggacgaggcgaggctgccgtcggagtcggtgacgctggacgtgacgagcggcggcgcgcgcctgcgcggccaggaggcggaggctctgca

SEQ ID NO: 8882 - DNA, 547 bp, Zea mays
ttgttgccacaaatcacaaattgcaaaaccacaaagacaatcgttcactgacggatatcacattaatcttgatccctaccaaaagaatacctatgaactctacaagttgggcctatcacatgactcttggcaatttcatgagaagtcagacaaaagtaaacaaaggtgacatcacaacaacatatttaattcagttgactaagaatcacaaaggcaactgcatgattacatacatgaataattggtctcaagtctctactctaaagtcatggtgacatggtctgattgcagaaaacgaactggaagaaagtaaagaattaagcggttcagaaacatagaaaagattcaagcgctttgtgcaatttgcattaggagggaaaaattgttcagcaaccaaactacaggacagaacacaggcctctggcaacctaagtcagtactggagatgcaaattgaaaatgaatcagggattacctcaagccctgtgttggagatgcaagcagcaacagaagcccaaggtagtaagtgaagatcatattccttggca

SEQ ID NO: 8883 - DNA, 528 bp, Zea mays
tgcaatctcattcactgaggtgagcgggcaatcatcctccacctgtgctcaccatatatataatgacgatccatcagcagaattgcaaacaaaagtcacagaattgcaaccttgatctgctccatttttatttataaacaatagcaatagagtaaacagacgcggaacgggaaggaaaatttggagcggctgttggagacaaggcaagatccaaaagagggcacggaaacctaggcgccaacttgcctcccgagtcccgacttcctggccaggccaggcgtggtattgcgaaccaggtacgggtactatactccttggactgagagccatcgggtagctagctttatctctgcctgtgattgtttacgaggaaatgtagtaggactgtaggaggaggaaggttgtggttgtggtcttgtggagttaccttgaggctgaacgagtagagcaccatgtggccggcgctgctcatgttgaggtggagcacggtgaggcggtggccctggagccccagcaccagccgcagca

SEQ ID NO: 8884 - DNA, 476 bp, Zea mays
tggcgagtgccgacgcctggccgtatctctcatcgcctcttccccgctgggggcaaaagcacgcggcgacagaagcttccccgtttcccacgtcctcgcaaataccgcgaagatgggataggaccacgcgtgcggccacgctgtcgatcacagccgctagcggccagggtcggcgtgagaaaccatggggtttcccctattcgccgtgatccaaacgtgcggaaaggggaggccaatccgccggcaacctttcggtcgctccttctttttattcttctatttaaccctgccccacgcgtggctcccacggaacggccaaatccggaagcaaagcacaccagctcatttgcttcgcccgttcgccgtgcgtgcgtcgtcaaccaaagactcgtttccttctttgtgctcctgttcgttccttccttccctggaacccttcccccgtaagctcgccgctgcgctgcgttcggatggca

SEQ ID NO: 8885 - DNA, 561 bp, Zea mays
  unsure (1)..(561): unsure at all n locations
tgaaaccactttctcagtgtgccacaaataattttacaaaataggaacatgtaagaacaaaacaatcccttaacgtttaagggtcgtaatggaccacaaaagatcaaactataaaattatgacatctctgttcaggcacatgaatgtcacgcaaccttttcttttaatttaaattacagaaacttatttcacacctgacaatagtaatatgcccatatattactaagagttatccaagaaacaacttttgtaaaaaaaaaaatacagtaaaaggtagctgatgcagttgttccactgcagaaccgaagaaactagacatgtagaattaagcgtgatcaattgcagggaaggacattgtgtccttgctgatgccaaatttggtgtagttcattttgatcttcttcagggtcactactacatcactcattgacatcctttggttaggtgaatcagtcgtgcagagcaaaccgagctcaaatattaggggcaaaacctcgttcaggttggctgaagaagaaatggcatcctgcagcagggggatctngagatcgtgcaaggcaa

SEQ ID NO: 8886 - DNA, 500 bp, Zea mays
tgaagaaagaggccagacggccatggcgtcaccgcatcacacacacacacaaaccacgaattcgccgcgggttttcgagggggcgagcgagcagcgggaggccggaggagggctggcgagtaaaggggggcggggcagtaataatgtggagtggtggactgcgctgcgcctgcgctgccgctgaggcctgacgggaatgtgtcgttttccggcacagtggcgggccgggaacgccgccacatgttgcaaacggaggcgcggacacggacacatgcggggcaatgtgcaaaactcccatggaaatggaaggttttggcggatggcgagcgaggcaccgagtagtgggttggcttggctggctggagtagacgaccagaccagaccgccaagaccaagacggaaccgctgccgccattataggccgctcgctactgccacgcaagcgccacgtccaagaacagaacgctcgatctcaaaagcaagccacagcaggctcagca

SEQ ID NO: 8887 - DNA, 832 bp, Zea mays
tgactcacccaagcggaacggccaccatgcgtatgggtctgctgactcacccaagcgcaacgggcactgcgtttttggatcatcagacctcaagccgaatggtaatggccacctgcgctgagcagaactgtttggcctgtgagctccctgtacattcggttgcgatgtgagctccctgcacgttcggtcgaggtctatcgtgaacccactatccgagattgatgtggatcattgggttgacaggtcatacagtatagagccggtggcagaggaattcctgtttgctgtgggtaaagcttatcttctgctttcgtgttttttcttgcttctttcgattatggtgtaggaatgtggtcataatgtattagctgattatcctttccctgctaattggactttattacgcttcattaagtttggctgattactgtttaacggggaaaagttgcatctgtgtacgattatttatttgtacctgtaatatttatggagaactagcctcgccgcaaatagccctgatgaattcagcatacatcactgcacttccacttgacacctatttaaacggcttgtctcgccgctaccttatcctatttccatacttcttgtcgctccatccccgtatgggtggggaacccggcgctggtctagggtgagcccacccgcaggcctttcaggaagctcccaaagaaacaaagccctttcctactggggggcggggccaaaacttaccttcaataaggcatcctaacggccgatccaatatcctcttactaaccacttgtgggcattaccctacacaggtttaaccctgcctaggcacccctaatcc

SEQ ID NO: 8888 - DNA, 502 bp, Zea mays
tggcatgcaccagatttttaaggaaagattaccctgaatctgagtgcttgttcaatgctgccttttctgctggccatctttattcgttagtgggtttggctagattggcctctctgaggggtaataagcattttgctctcaagttgctagactctgtaatgtcatctcggtggcctcttggatggatgtatcaagagagagcactctatttggatggtgataacaagttagaaaatcttaacaaggctactgagttggaccctacccttacatatccctatatgtttcgagctgcatctttgatgaaaaggcaaagtgttgaagctgcattgatggagataaaccggatccttggatttaaactggtgctggagtgcttagaactaaggttctgttgctaccttgcccttgaggattatagggctgccttatgtgacgtgcaggcaatcctcactcttgccccagattatcgtatgattggtggccgggttgctgccaagca

SEQ ID NO: 8889 - DNA, 519 bp, Zea mays
tgcagggatcggattggatggttaccattaacccctcggtaagttcgcttggaggggggagcgttaagaatatttgggagcaggacgattgttctcttcctcatcatcactcgatctctgacgaccgatgatggacgaggagaaatccaaagatgaattaagaaggcctgcctggctgcagctacatacagtagcaagcaagagatgaagagatcgagatgatagcctagcctagctggctagtaggcaagcagtacatcctaggattgagagagaaagagagcgagggcaccactttgcactgtgcaaggaagagaaggacaagtgagagaattaggttactgccatgcatatatccatgcacctctctctctctctcgtgtctttattgagagagtgagagagagagactgtctgcaagtgcatgtaaccaggccgggagtgctgcagtgcaggactactgcaggcaggagtggctcaaggcaagggtgctccctctcctcccggcccgtcgttgca

SEQ ID NO: 8890 - DNA, 497 bp, Zea mays
  unsure (1)..(497): unsure at all n locations
tgacgcacctgctgcagcacacgctgcggagcctctgcaccggcgacgccccgcagtgggtctacgccgtcttctggcgcatcctgccccggaactacccgccccccaagtgcgtgagctgatctcctctcagttctcactcagatccctatctgctaatgcgcattctaatcgcgaccgtgtttcttcgcttaataacaacctgtgcttgatcagatgggatctccctggcgccgcgtacgacaggacccgagggaacaggaggaactggtacgcgctgctagctgcanccacacacagcacgctctcatattccttcctccttcctttgtggttctgtgcatgtcttcggtggagtcactcccatgtgaatgccctcgggtgtgttcttgcgcgtctcgcttaggatcctggcatgggaggacgggttctgcaacttcgcggcggccagcagctctgccgccgcgtccgcgtgcggccaagagggggcagcggca

SEQ ID NO: 8891 - DNA, 479 bp, Zea mays
tgaagcagcggtttctgtaaagcgggcacgctccccttcgccccccctcccgttctccagtccactccactccactccactcccgttcccctcccaattcccaaaggccaaagccctcctctgctcagctctgttccgctctgctccgaccaaatgcgcgattagagccgcccgcgagatcgatccccgcgcggccaaggatcatcggccgccatggcgtcctcgcaaggggagccggtacccccgtggctcaagtctctccctctggcgcccgagttccgccccaccgtggccgagttcgccgaccccatcgcctacctcctcaagatcgagcctgccgcggcgccattcggcatctgcaagatcgtgccaccgctcccgccgccgcccaagcggaccacgctcggtaacctctcccgctccttcgccgcgctccacccggacgatcccaccccgacattccccacccggcaccagca

SEQ ID NO: 8892 - DNA, 485 bp, Zea mays
tgtcgcagcactgcacaggtgagcaccgaatgacagaacacacagacacaagcaccagcaaatgctgcttgaattaaactgcttcctttcattatcatatcaacatatatatacacaaagacagttccagtctgtgtgtgaagcggaaccagtgtcctagtgctgctattcagcctactggaaattgttagctcttgcaatgaaattacactgcaattgcttccaagtcacaggttcgaagcagcctctccacatttagagggaggcttgccttgctttatcccttccccagactttctgtcacagcaaggccagatgtttttttgtcgaacacacaggagaactgtgcatcattgtactaagaagaaaaggggaaagaccccagaactaacattacaaagagaagacacccacacacacacacacacaagaaaaaaccccacccagccaagccagagtgcctgtcaggggtaccgagctcgaat

SEQ ID NO: 8893 - DNA, 481 bp, Zea mays
tgtagcaattgacagtatgaatgaacaaattgattttgctaagatccatgctattgatgctacagttagcagttcacaaggtcctgtgattagaaatgacaatcaagttcataaggcatcaactgtacattggtcaagtgagagacaaggcatgaatgatcggcaaattacacaagtttccaatacagaacgagatgatgaagcaagaagtatttttcctgaatcctctcaggatacacatcataacatggatttgatctggcagcaggcagacaccagtgggatctctgatgacaaaaatattactggtttgctcgtggagagcaccaaaaagggatttatgactaatgtggatatgggaaaacaagaagcaacaatgggtagctatgaccaagaagtaaggagtgaaattactgcaggaagtagtttaccaagtgattcaagtgccagacagtctgtcaaggaaagcatgctagaatca

SEQ ID NO: 8894 - DNA, 507 bp, Zea mays
tgcttctgaatttggatacataccctacaaggctgtgtatatgtgccatcattgaggatgctgctggaggcacatgtgcatgcaacatcctttcatctttgtataatgaccttgttattagtatcttataagtttgtttacactgatggattattctttatgtggacaaagggggctacaagattggttttgatggattatgacaagtctagaagaagtaactccaagaagaggacacattccaattctgatgacggaaagagaaaacggttaaacactaggcatgatgacacatctatgttctctgagccaattgaaaccatctacaggatattgtgcccggtaaaaaagataggcagtgtcttgggaagaggtggtgacattgttaaggcccttagagaggaaactaaagccaagataagggttgctgattccattcctggtgcagatgagagagtaattatcatcttcaattaccaaaatgagcctgaaccgactgatgaagca

SEQ ID NO: 8895 - DNA, 461 bp, Zea mays
agtatgcgcttttgaatccatctccccagtcaccagcctttccttttaagctcacgtagtagtagattaggcttgcgagggcgagggacaccacggtaaatgtccatgagatcataaacatgataactgcatatttagaggggaaattatctatctatctatctaccattagactccaacagttcaacaatgtagggacgaagaagcataccgatacattgagttgcaccgaccagcgagaggagccagtggtgtatcttccagcgagggcgccagctaggagcgtccaggagatccagaagaaagcacgacaagttaacaccagcatagcacagaaggaagaacatggtgatggtgggcgtgatcagatccaggttcccgatcacgacacaggcaacgcatatgaagctcgtgaacagagtcgccacatgaggctcagacccttcgtaggccttgaaaca

SEQ ID NO: 8896 - DNA, 465 bp, Zea mays
tgaacgccattactcgctgcgcagtttgtgctggaaagttccactagctaaattctcgaacatatagggggcgtttggtatgaagagttaatctattttatagaggagatggtgcattacaagtcaatttcataaatttagtagaataaacttatttatcatattattactaattagtagactacgagaaatgaaatagtgatagatcaacttattacatttaacaacccaaacaagaatgtgagaactgataagacgatgaaataccttatttctcgaaccaaacacgctaactcgttcgcttggtctagaatcgatgcttcggtcacgctgcaaacgatccggcgcgttcgtgtctggcttcggagaaaaaacggcaaatgcagtgaggcacactctttgccaaaaaagattcatgtgcgttgttagactgtaattacgggatcagatcagaccaactcggca

SEQ ID NO: 8897 - DNA, 526 bp, Zea mays
tgctaccggtaggtgtggctgagcgaccacagggtctgtttggcagcgtcgctgaccgaggcagtgtaggtggacagcggtatcagggactcatgagcagacagagtcctgaatcccctatcccctgcatccatcaccctgacgtggatgcgagtgatgtaatagcaagcccggggaggcttgctcactcgccttgtttcgtacagggggcggacgtaggtgcctagctcgtgcagcacgtcttgcagcaggttggggaagtgccccgtctcgaacattgatgtgtaatgttcgacaacaggaccaaacccaatgaagtagtcctgctgggcgtagtcagcttcctcgttgacatgttcgtctcctccttcgtcatcgtcgtcgtcatcctcgtcatcgtcgtccccagagtcatcggggtcgtcgcctccgagtgcaggtgcttggacggctggtgcaggcggggccgatgtcgatgagctagctgcgaaggccagggactctgccaacggggtgggcgtcggca

SEQ ID NO: 8898 - DNA, 491 bp, Zea mays
tgcaaactgaacttttgttttcccgcagtgggagtgcagcgttagaagaacttcaggtgggtttgccttgtcttgactggctggtccaacaaccagttgattttatgacctaagtttgtttcctgtgtctttcagttgctgcagaaaaaagtctctcttcttgagctgaagaattctgagcttaacaatgaacttaaggagaaggaattgtcatgtgagcagttggcagagcgggcacaggctgctcaggtatctatcaacatatcacttttttgttctgttaaaaaatgctggatttatgatgtaatattttcatttctcttagtttgatatatgcctaagatctcactcttgtaaaatttctttatggtaaccatatgcaattaatttatagcacgtgagctaaccaattagacttgaaaattgctactgacatgtcaccttagaatgataaatttattacggacttacatttatttaactttgacaca

SEQ ID NO: 8899 - DNA, 534 bp, Zea mays
tgcttagccccagcttgacgacgaagcgcgtgatgaaagcacgttcatgagcgtgaactgcgacggcgcaaacccttcaccgaccatgtacaggaatgtcttcacagcatcctagaaccgaccggagcagttgagccgagcccgacaaccatgatggtccaggacatggcgtcccgattgagcattttggcgaacacgacacgggcgtcagggaggcggccggacttcgcgcacatcgatagcagcgagttccaagtgaacgtgttccaccatgcgtacggtatgtcgtcgaacaggtgtcacaccacgtggaagcaaccacgactcacgcccacgctggcatataagcgaggaggttgttgcagaggtagatgctgacgaggaggcccgccttgatggctatggttttgcgctacgggagcggggcggggcgcttggctcgcatggaggcggaggcaaagctgtcgttgtttgcactggactggttgtacgtaccgacggtcatgtgtgcgaacacgcaggggtaccgagctc

SEQ ID NO: 8900 - DNA, 456 bp, Zea mays
tggactactagagtaagcacatggtcttaacaggttcacactgcgtgctgtgctgtgtgcacaccccttttctgctccggcgcagagattttctaccagtattctccggacaaagtttttcaaatttaactagattcgtaaaagatattactagtatttgtattttggacaggtttattatgagaatagattcgaaaacaaaaacgtcaactattttaagacggggtgagtaaataatataggcgacaaagattgcatagaaaaggagtcataacaaattcatctggagaggggccgggacgaaatatctcttgggctgcaaggggagctatagcccttaggccggaccattctcaagagatcttcggtttttttttttttgggcatgatctgggtaaaagggggtgaacaaaaagagtaaaaaggaggaaccaggaacaaaaaaaaaacatatgt

SEQ ID NO: 8901 - DNA, 886 bp, Zea mays
tgagaaatctttatcctcaccatgagaatgtttacctgatgaagataaaccatactttcccatgccaggagaaatgcaactgcgcttctgaatgtttttcagagtctcactggcaggactacttttgcttatttcaaactcagagggttgatgcttcatcacagggccattggattctttcttcattttctttgatgctcgcaggttatcatgatcaacccctacactgcttctcattcgacgtgattgatcttttccaacaatttctcctaaagaaatgtgaatctttagaaacaaaacaacagaaaggtattagtaaacttcaacaacacttaggtggtgcacctttatctgatgattccaccagcttccttttttccttcagtttagagaagtttctacttgaaggagcatgcagattctttgagggctttgacatacctgtttgtaacaggctaacagctactaaggcgtcgcctaggcgcccgcctaagtcacctaggcggtcaggcagtggctgggcgcctagttccgcctagccgccttttaaaccatgctaggaacaacaaggaaaaggtccattttactacttcaaactattcactttgcttttttgaccccctatacgaaatataggccccattcaccccatccccgaaaggtggtgttcggtttctcttgcaaccaaagagaatgggagggggtgatggggactaaatcccaaacaaggtaaaaaccttctaatccccctccaaaccccattcaaacctcatgggtttaaggaatggaaaccaaaaaggtctttaaaaaaaaacttttccagggccccgaatggaaatatggggaatcttgcccttttttttttttccctttttaactaggttcc

SEQ ID NO: 8902 - DNA, 478 bp, Zea mays
tgcaactgtacaacaaatgttgagagagagatcagttgtgagacgccctatcaacattgctgctgagaaggatcggttgaggagtgagttggagatggctctaagtcgtaggaatgaagctgcagcagcgaggattcgtgcgaagctgaaaaatctgcaaagcaggccacaagcggtgtcaaaagttaataaggctgcaaatttggagactatgaactggaagaatcgtgctgataacttcaagaacgcttcggaactgaaacctgtaaatacatctttgaaggctggagagtctggttatgaccctttctcgaggaggtggacaagatcaagaaactattatgcatcaaagccaggaggagataatgctgaagaaactaccaacaagtccagtagtattgtagagcctagcaatgaagatataaagagcaaggctcaaactggtacatcagacaaaactgcagctcaagtggcagca

SEQ ID NO: 8903 - DNA, 536 bp, Zea mays
tggataatgcatgctttcatataagagaataaagcactcactagacgtacgtgctgtgtggagcaggcccgttgctcttcacgttttgctgagcctgcgatgatgatcgctgtatgcgaggcgacgagtcgtgcttgctgtcggtcatgggcaacgagtgccttttccttgggttgctgtcctgcacatctgggctcatcttgggggacgacgacaccttggctcttgcagattctgtaaattgcatgtagctcggcaacgggttgctgttgctgttgctcgtgcgaggttcttgttcaacgtggtcggatttagcagccttgcttgagctctctctcttgggatgccttgatttctttgagaagttgtcggtgctgctccggcccactgagtcactgcctggactagccagtgacctcttgcctgcatggggcttgggctttttgctcctgctctttttggtattcacagagacttcacttgacggtgtttcttgagattccgtgatggtcgttcggctcattggagttccttca

SEQ ID NO: 8904 - DNA, 499 bp, Zea mays
tgactttaactatgatcatgagcatcttggcacaggaccacagacccttgttgagattgcagagggtagtcaccctttctgttcagtactgcaatctgccaagaaccctgtcatcattgctggagctggattatttgaacgggaagaccaagatgccctattctcattgattgagactgtagccaagacgttcaatgtgactagaccagactggaatggccttaatgtcctgttgctccatgctgcacaggctgcagctcttgatcttgggcttgttgctaatcctgccgagagcatcaagtcagcaaagttcttgtatctgatgggagctgatgatataagcctggaaaagcttccagacgatgcatttgttgtttatcagggacaccatggagacaaggctgtctatagggccaacgttatcctgccatcttcagcattcagtgagaaggaaggcacctacgagaatactgaaggatgcacccagtggaccattcca

SEQ ID NO: 8905 - DNA, 547 bp, Zea mays
tgctgtcaagtgctgggaacaagatctgtggtaaaatccggtgtagggcacatttgctggcctccttgctccacttctttttaccacctgtgccccactgcccccgatactgggaaagttctcttcgtactttgtttttcttttgcgtcactatataatactgtgttgtgagcctctcaattttctgggcattcattcatgctgttttagttatacaaaaaaaaaggctctatcatgctggaagctggaacacaagatgtgttgaatcattgtacactttggctgcgttcgtagatgccttttttttgcaacagaatgtgcttagatagaaatatttatgcggaaatctctttgttcttaataatatatggagaataaagcttttatttctcccctgtctttattttcctatttgtgatcactatgcccgaccatctgcataaagagaaaatagacacccggaaatttttgagcggttcctttttcactggcgcgtcacagtgtatgcaacttcatgaagatcaaattctgcccaaaatgtagtttc

SEQ ID NO: 8906 - DNA, 476 bp, Zea mays
tggacaggattattcaggaccacgaatcaacggcgacggcgagaagtcctagcaacgacgacgaggatgatgacttcatacataccttgctcaccgttcgacacgagtacggcctcaccagagatcagatgaaagctatcctgcttgtatgtagaagtatcatggtcgtcgatcgcctcctctcgcgtacatgaaaaataaatgtctgacagaaacatgtcaatctttgcaggacgtgttcttcgggggaataagcacagcagccacggcactcgaattcaccgtcgctgagctcatgcggaacccagatgcaatgaggaaactgcaagccgaggtacggagcgtagtacccaagggacaaggtcccgtcagcgacgacagcctgcgcgacatggcctacctgaaagcggtgataaaggagtcgctccggctacacccgccgacgccgatcctgacggcgcacttcaccatggcca

SEQ ID NO: 8907 - DNA, 509 bp, Zea mays
tgcgtcaacaatgtagccaccttctcatcatcgtcctcagcccaaggcgcagcctccaagtactccaagcaagacaacaccccggcatcgaatacaatggctgcggacacctggagaaggaacagataaataaattagtgtgcaaaaaatgggaaatcgttccgcagaatcggcatacatgagacggtagaaggccgcgataccttcaggatgccaaggaccttgttcacatcctcccgcatcagcctccggcggagatccttgcagtacatgagccgcagcgtctcggcgtacacctcgacgtcgtcgcagtcggagatctcgacgatgtgcggcagcgttcgctgctgcttggaccagcggtcggacagtttggcggcgaagaacctgctgtgcgcgacgagtatgtggcggtgaacgcagagcgtgacggagaggccgtccttggagctgagggtgaggcggacgtcggaggagtcggcgtcgttgaactggttcccggggctaca

SEQ ID NO: 8908 - DNA, 794 bp, Zea mays
aagcgcataagtactcattggaaagataagacaaagccatacatgattatcatactggttagcactaattaaccacgaaaaattcccagaaactgctaatactactgctgttcacccacctgaaaaatctgtttttttggacagcaacatacccggattcaaacgacgatatctcctaaattataactccgaatcgagcgcataagtactcgttggaaaggtatgacaaagctctacatgattatcccactgattcccactaattaccccacgagaattcccagaaactgctaatactactgctgttcacccacctgaaaaatctgttttttttggacagcaacatacccggattcaaacaacgatatctcctaaattataacttcaaatcgagcgcataagtactcgttggaaaggtatgacaaagctctacatgattctcccactgatccccactaattgcccacgaaaaattcccagaaatccctagaactactgctgttcgtccacccactaaatttctggacagcacctctaccaaatcgcataggtaaacatgtaaccaattggattgcagcacaaatacaacaaaatgatcacgaaaatcaccttgggttcctccttttctccttcttttcttccttcttcctccctccaaactcccatggaagactcgcacccacacgacggacaccaagcggagaggctctaccttgatgaggaagaggtggggggggatagggttgaggggtggcgttgcaatcacttggggaagaaggagagggattggggca

SEQ ID NO: 8909 - DNA, 915 bp, Zea mays
tgtttttgacacacaacttagtgcaccaatttcacataatcaggctcataaacgatgccgcacctacgcataaactcaaaccccaccgcgggttacatctctccccactcccaccaaactgcagtggcgctgcttaataatttcataactttaaaattatgacagcagtggtaacaaacaaaaactccagaggcatctacataaaattccccacaagttttgtatacaatttataattaaattctaacatctaattagcccaaaacagtccacaatatgaaccctgtaatctgttttttttttgtcttttggacagcgacatacccggattcaaacagcgatatcttttaaaatataattccaaatcaagcgcataagtactcattggaaagataagacaaatccctacatgattatcatactggttaacactaattacccacgaaaaattcccagaaactgctaatactactgctgttcactcactggaggagattctgggccgtcgtcatcttcctccccctactgcttgatccacccgcctggtatggtattcttgcgaaagatgggacatctgccgcagatggcagatcgtggagaatgggacatctgccggatggtatggtattcttgcgaaatctacgacggtcgcgtcgttctggaatgttgttgcccctactccgattggaggacgatgtcttgcagatcctcgcgatctgtgaccctttgtccatacctgacggccaatcctacgaacataacctcaaaagttatgatgttctgtttgcctttactgtagatgttatgattttctgtttgccccttctgtagacgagggctttcaaagtcattaaggtgcccgtcttgatggtgctcaagagtttagtggtgatcatcttctcttcgggctctggc

SEQ ID NO: 8910 - DNA, 919 bp, Zea mays
cagagctcaccatccacagatccggggggcaccgtcatgttccctgttcgcagttcgatttccccaaatccgtttgccaccgtacgtgcctgtctgtgtgcggcgcccctcgccataccccgtcgtaaccttccgccagttcgcccatgctgatcctgtagacccacacgcagcagctgcaggagaagacgtggtgtggtgcgttcccctcgtcaaaatcgccgctgcacggatccacatttcctccacaactctgcactgtcgaggcatgggcgacgaacctgttctccggtctgcggcaacaaggacagtacctctttcactttatttattattaaatgcctccctctatctctatgctctccctcccctcttcgcattttaggtccctacatctaccgctgtcctcgaggactctttgggtttgttatttttttggagttgccagctgccgtgagagtcactgccacccacctccccccatcaaaccctagccgcccctcctcaagcccttctctccaaggtgccattcctttcccgctcggatctacgtcacgttggtgcaagtctcccattggtttttggtggagggaagaagaagggaggaaagggggaggattcaaggtgatttttgtgtttgtatcttgtttatttgagctgcaatccaatcgattatatgtttatctttgcgaatcggtagaggtgctgtccagaaattttgtgggtgggcgaacagcagtagttataggggtttctgagaatttttcgtgggaaattagtggggatcagtgggagaatcatgtagagctttgtcatacctttccaacgagtgcttatgcgctcgattcggaattatattttaaaagatatcgctgtttgaatccgggtatgttgctgtccaaaaaaacagatttctgca

SEQ ID NO: 8911 - DNA, 459 bp, Zea mays
tgacacacgattggtgcgtatcgaaagtactcgttaatatctccggcatcgtcacggcggcagccgggatcccccccggtacgagttggtcgagccgtcacgtggggccgctctggcactgccccatggcccccatcaaacactcgccccaacctcaaacagtgaacggcgccaactctccgccgccgtcagatcggagctcgactccgaaccccgcttttcagccgccatggcggcgccaccgcgccgctcgctccttgtcctcctcgcggggatcctagttttcggctccctcaccaccctcgccacagccatctacgaggaccaagtcggcctcgcggactggtacgtgaactcgctcgctcccctagatccgatcctcctttagcttaggccggcgcgacgtaatggaacttcgagctcctagttcagatcacgactaggattgtgttgtgagca

SEQ ID NO: 8912 - DNA, 517 bp, Zea mays
tgacacaaagtgatcacaagttgcaggctcgatcagctcgcgtagagaaagcgcgagtggtgggatcgattctttttttaccgcatgcatgcatgcccttggcgatgactactacgtagttttggtttttactacagaattgggtgaaaagacatgcaggaaaaaggccctgcggctggctggctgcgcgagaggtgacgacgaggaaaagacgagcgagagaggccgatcgacgacgtcgatatacttgcatgcatgggcatgcagtcctgatggatggatagctctccgggcgacatgactagtcaccgacgagggaaagcacaaaagagaagcatccgagagaggttgacgagggcatcgttgtgtggtaacaatgcaaagcacgcagaggtggcgacgcacccctctctctctctctctcgcgctgctgctcgtagcatgcatgcagcaaaataaactccgcggcgaaagatagcaacagtaagtcacgaggagtagccagacactgcttgca

SEQ ID NO: 8913 - DNA, 486 bp, Zea mays
tggtcctgcagggcctgcttcaggcggaggccctccttgaagaggttgtccacgtcgtggaagccggcgaagtcgcggatgtccggcgacacggagctcaccagcagcggcatgaagttatggagcagcgccttgagcgcgccctccgacagcatctcgttcttcccctcctcgaactcctcgtcccgggacacgtagatgggctccgggtactccacccggctctccgcgcggtcgtctgcaagcgccaccacgaggaaatgttagcctcggtcaacgtcgcccgcgatcgggtggttccgatacgaaagctacgcgggacggcgacggcgccctctccgccatgctcggtcgccactgttgctgtcgcggaatttataggacagatggcggtggtgacaaagaactgaacagggagacgggaaagcggaggcttgcctgtgatggtcttgggccggcccgttcgcatccgccgcgggtacggca

SEQ ID NO: 8914 - DNA, 574 bp, Zea mays
tactgcaggaacgtgttccagtctctccgcttctgcgactcgtatctactcagcacgaattttgagatgcttttttaatttgtttttttcttatatcttttaattgaaagatttaatcatcgaaccgatttcatatttatgtttctgatatttttgcctatagaattagaccacacatgatgtataatctttaaagatttatttatatagtcttctctagtacacgtcctcacacagacaaccaaacgctagctgcatttgtcctaaatgtaccaatacaaacaatcaaacaaaagacgcacggatctagcctgtgcacaaagagctagactgctcatatacaagtcaggctaccaccatacaacaaccaatcacacggtcaatgtatctcattcgtctcaacttgctcaaaataagcaatcatccaaattgaagaggtacatgcagcgcaaactccaaaaaacatcctataatatatataggcacaacttgcaaatggcacagccctgtgtccgcttgtcttcatctgtattgtatgaccctatgtttatttccttcccctggaccaggacca

SEQ ID NO: 8915 - DNA, 424 bp, Zea mays
tgaaggcaagcgctagtgcgctactgaattaggcagtagcaagcatctgcttgtatgagacgatgtgtcctcgcaatgttatccagttgcactacagaaaagagaagcgagcctttctgacaggtctttcaaaaaattatcattttttaagagaagtttggattatccacacaatccatccatattacgcttcccctagccacttttcgaatggcttaaaagaataaatttaaaaattaagcactaaagtggacaaagcaggttttgaaataggatgcgatagcatatcagattttttttttcctttccagcatagcaatgacctaaacctttgacctacacttccttaaagtacaaatagtggtatcacagtcaatcacctgatcaagaaaagaagccaagtttcagccaatagcatttacca

SEQ ID NO: 8916 - DNA, 1131 bp, Zea mays
tctactctagaggatccccgtggaggcgaacttgctggtgagctggacacaaacccgtgggccggtgctcacgccaggataagtcgcctcaagaggcagcacacctcgccggctgccgccgacgcgccgtccgaccccgccaggcagatggagcgcgccgtccgcacgtcagcggtagtcaagctacttacccgatccctgctatctggcgtgctccagccgggccggcacctgaccgtcaccaccggcaccgcctccgccatcgccggcaccagctcgtggccctccacggcagcgctgccaagcagatcggtcgtggcagacctgctcgacgccatcgagacgaaccgggccgtgccgcgctgcggtggatccggtggcgacggcggactcggactcgggtggtggaacctcaacgtggagggtgtaatgctgttgctcagggtcgtccaggcggtccggggaaggaacaatctagcggcgccggcgccagggggaaagaggccacgggacgagggaccctacgaacccctgatcagtagtgggcgcggagcccgagtgctctgagacggctgtcgaaccctttcgaggggccagccttcgaacctctgatcagtagtgggcgcggagcccgagtgctctagggcggctgtcgaacccttccgaggggccagccttcgaacctctgatcagtaggggagctcggggcccgtttccttcgcggagaaggatccctttcggggtatcccctttcccggtccctgttgtaagagagagaaagaggaaaaggaaaaggatacgaaatcgaatgacgtggcgcaccttttttgacgcggtcattatggcgaaggcgaagcgtcgcccgcttctcctgccaaaggtgccgcctgtcccaccgcggagttaatgcgacgggacgagtggttcgcggggcagccgttgcgcgtgcgcgagccgttcgaggaacggaacactggcgcgccgtcttcacgccgtgggagagggttttctcgctgtcccatgaggggacgtgagcttggctgatgacgtgaccgctgcttccgcccgcctgccaccgccattactgccggcccattttttgccgtattgaccgtcgcgccttctcccaca

SEQ ID NO: 8917 - DNA, 503 bp, Zea mays
tgtcgcgacggtcttctttctgtcctcctttgaggacggaggcacagaaagagcagcttgacgacccttggcttcattcacttctttcctcctagtgatccgtgtccatttttctgtcggagaggtggacagcggggttctccgggcagatgcatcctcggctcctagtttgctgaaggtgatcttttctcggagcgctggaggttgcgcttttccctgctttgctctgattttctcggagatctttgaggacgactttctctccggtggatctgcgatgcgatgcagagttccctcctcatccgctatagatgagatagttccaaagcagaacacggacccgggacagaggatgatcttgtgcctgaaggtgacagccattgagctagcttggatcgacaacacaccccctacctggcgcgccagctgtcgatgttttgggtccgaccgcgcacccggggttgcccctcaaggtgcttttcggagtaggacagggttaccaa

SEQ ID NO: 8918 - DNA, 537 bp, Zea mays
tgagaacctctgcaggcacacctctttcctttctactactcctcctagaaaatccaggggatgggggggcttgcttcgctttttaaaggcgtccaaaaaaaagatcgtttttttttttaaaaaggcgtcccaagccctgtctcctcccgtgatgttgggggggatcggggtgctgcgatgcgaaggtatctgcatctgcatctatctgatcattatatcttttgcttttattttctttttgctgcctctcttgcttcagaaggaatggaacaagggggcgggcgtgtgaaccacagacaggcctccgactccgacaacgacaggtcggtgtcgttacgttgaaaacctagccgggcgccatggctggccggcgaagcaactaacaagaccaaggtggacagatggagggagacggtggtacctgtaccttctcggcggggtagttctccggcgcctgcgtccccatggccgccgtccgtacgtcagggatgcctcccttgcctcctcctcctctcggtctcggcggagagagatgca

SEQ ID NO: 8919 - DNA, 474 bp, Zea mays
tgcgacgatcccgccaccagggccaagcttcagcgcctttgtaagcttctttgtttcatcacagttgttgttctataaattcatcttgtcttcacgttgaaaattttaggtcgacaaatgcagcttagctctagtcataaacatctatggtctaaacaacaacgctcactgaataaggaaaggacaatgagtacaatagatcaccatatacagccttcagtatttatgtgatgattcgatttgcctccgataaacagatgagtattgcccaaatgatttaattttccaggcacgactacaacagtgaagacaaggtacactgttatgtccaaggagctattggataagcacccagagctgaagatggagggtactccgacactgacaccccgccttgacatctgcaatgccgcggtgatcgaccttggtgctgccgcagctcgcgctgcccttgacgaatggggtcgccctgca

SEQ ID NO: 8920 - DNA, 466 bp, Zea mays
tgctcgtcttcaacacgtggcactggtggacctacaggggcgccagccaagtgtacgtgatcgccattaaccaccactgtcctatatatttcaaggaagccacacaaatgccaaacgccatgctcgatctgcgtacgtgcaggtgggactacgtgcaggacgggaatagcacgtaccgggacatggacaggctgacggccttctccaaggccctctccacatgggcgcgctgggtcgacgccaacgtcgacgcctcccgaaccagggtcttctaccagggcgtctccccgagccactacgacatgtgtgttgttcacagcttccaaacttgcccggatcaaactctgtcgtctctgaccatctaccttgcctgcaaacttgaatgctgtatgtcgtaggtcgtcgaagcagcaggagagccaggctgggacgacgacggtgccagcagcagcggccgcgggaggca

SEQ ID NO: 8921 - DNA, 481 bp, Zea mays
tgtgcgcattacggaccagtagtactgcttattatatcacgtggcccactcgagcgaccccactcactccaccggtccacccccgcccgtctcgtgtcagtgtcactgtcacccagatctcgctctcgcctcgcgcgcgtataaaacggcggcggcgtccactcctgcctctgcctctttgccaccgtccattcccccgttccatccatccatccacccacccaaaagccacacacatggacagcagcggaagctaggcctaggcggcgtcgtcccgtccagctacgcacgcagctatagcctatagctcctccccgcccccgcaccatccccagcagcatgtcgtcgtcgtcgtcgtccagggcgcggcggggcgggagcgggagcctgcagcagttcccggtggggcggtggcggcacgtggcggtggtggacgccgggtgcggctgccgcccgcgccgggccacaaccaggctgctga

SEQ ID NO: 8922 - DNA, 475 bp, Zea mays
tgcaaaaaatgggtgtgaccgggggctcgaaccctgcccacagggtaaagagctgagcgcttccaccactattggtttgtgttatatggaggagatatactgtaaatacatacatactaataatttgaaattaaaaaaaatataattatatttgaataaatatatcatttaaataagatctacctatatgatatatagaatccgtagcaatttacgggcaactaactagtgtttcattacttgtcattttctttgtgcaatttatgggaaaataggttacaccatccaattttattggggcacagacaggaaaaggataaaagttgcaagcatgttaatgtcagtattgcaatatttccaaagctagggggcaagaaaagaaagcttgtaccttgatcaattacattttgcttccctctgatcgattcaatggctgatttcaaggtcttcacagtaatctgaaaatccttgaaca

SEQ ID NO: 8923 - DNA, 492 bp, Zea mays
tgcatcaaatatcatagaagtattgaagccggtattattttagatctgtctgtttatatgctgtccgagaaaaacaatgcaccagctcattaattgaattgttcctctcagcatgttatcctcggcgtcagatcaaatgatcgatatcgggtaaaattcaactgaacccgattggaatcaaccgtagtccaaaaatatcaagttgaaatcagtttaattcggtatgttgcttctcgctcagatccaaatcttcggatataaataactggtaaaaattcatttgattccgagagtattcaccaaatcaaattctatctaactttttgtatccgatattgttttgatccaacctatttatgtctcttttaaaccctgatcatggaacccatattcatttatacgttgttgtaaaaaaatggggaaaagaaaatctgaaaatattttctcctatccttatctaccgccgcgcccttccccctgatctttttcaca

SEQ ID NO: 8924 - DNA, 966 bp, Zea mays
tgcagatgttacgggttcagcttccagcgctgagcttctcttcaacctcctgcagcgtcaacgaccacctatcagcccattccaagcatcaagcaggggcttccacctgagctcctcccacgcgctgcgcctcgcctcggcctgcgcctccgtctccgcctcgcggcctgcgtcccctgcaaccaaagtttctgaagctcatttgcacgaacaagtggagtggagagaaaaatattttcgttcactttaccgtcgaggcccccggagggctgatcccgttccagctcctcccgctgcttctccctctccagtctcctggcgaagttcttcgccgccgcaaacacgttcccggggcgctcccacccgccgccgaatacgccgtggccttccttcggctgcggccgggacaggaactccagcacgggcaggtcgtggctctcgacccagtggatgcagtccacggggcaggactccacagccagaatcactgtccaggcgcgagcgtgggtatttccatctcgtaactctgcgcgcacagaggagcgagagggcaggtgcctccgaagcccttgtcgttcgagaccctgcacgggggatcagcaattaggtttttggggagcgtctacgagactgcccaacatccgtcgttgtcttcatcactgatgaacatcttcttcttcctggcgttttcatctcgtaaggatgacaagagaagttggacaaggatcaggatcctcggggcgcatgggatggtatgatcaattcagttccttactgttttacgttctgcatattatatatgtttcacatgttcatctctgttgtttcatatatagccatagatttatccaaactgttctgtcatatcatatcatgatagtaaaaaatgcctattcatactattaaaataccatacctgtttgttttaattttacagtcaggctgtttatactgcaatatatttat

SEQ ID NO: 8925 - DNA, 564 bp, Zea mays
tgcagcaaaccagtcgattcgcctcgccaatccaggaacacgagagacaggcagccgcggagtagcaatcccaattaacccccaattgggttgcggtccagccaacccaatcgggattaaagccgcgcggtgaaagcctggctgggacagcagttcaggtcagatgaagaagaaaaaaaaaggaagggaataaaaaggagctaaagaaatttaccaccaccgggctctaagaatagcaaagacaaattgcatgtggataaaaaaaaataaactggagagaaatctggagaccagtcggagactaacctcggaggacaggcggatcaatcaggcggttacgaagcgatcgggacgccgcgcacgctggagattgagggggcaggcccgccttgcaagtgttttgggtggaggcgggggtgttctttacttgagttcttggcccctgcttccttttctttttcttttttttaaatttattttttttaaaattgctaccttaaaactggatggaacccaattggttggctcgtggattcatccaatgtcaccatcctacacatagta

SEQ ID NO: 8926 - DNA, 475 bp, Zea mays
tgagaaatcacgtccgaggatttataattgagatttattcgtctagtaaattatctgctctaaattaaatcaagcgcaggctgtactagtttgactgatatcttttatttcgtccggcttgcatcccgcgtaaatttaatctgagaactaaattacctatgtagtcttttgtgtaaaaaaagagagaagaaaaattctatttttctttcaccattttatatcccagcattatctcttctccatcgtcactcctctcatctaatgggtagcgctcttcgattttttttccagccaccgctttggacttctgcatcatccccgacgccgctctaatcccaggagttccatctctcgtagctgtacttggtcttatccgtgtacagagttcgttcatctctccaacacgacatccctctccagctcattccagcgcactgcaccttttgctcgatgtcgtccccagctccttcaagca

SEQ ID NO: 8927 - DNA, 507 bp, Zea mays
tgcgcgtactgggccgcgcccgcgtccggggacgaactgctctcctgggcctgccacacgaccgtgccgtcgtagtcggtgagcaccatgctcccgtccttgcgcagggcgacggccgcgccccaggcgtgcaccgggcggccgcggttggcgctccacacgatggcggccgtgtcgtcgccgtcggtcgaggagttggtgtaccataccgagaaggtgaaggcgccgtcgtagatctggtggaagccgcaggagaaggtgccgtccggtgacgaccgcaggattcgggtcttgtactcctcgacgatgagccgggatttccgtggtatagtgtcatgcggtgcggtataggagaaggcgctggtcatcaggggcaggggtcgtggagcaagcgtggagagggtgatgctggcgagggcaagggcgagagcgagagccgccatgggtgcagggagtggtgtcagagctggcggcgggatgagcattcgtcattgcggttgctcatca

SEQ ID NO: 8928 - DNA, 1072 bp, Zea mays
tgctgtaagtagtcgcctttgtaggatcccctgaagaacagtatcaagtcaacaccctgccaccagcaggcagcaacgaacacacatccaatgtgctcttgcttcctcgcatcgcgtcatgccatcttgaggctgagccagtggaaccagcagcggcggcggcaccccgacgtcgtcctccacctgcaccacgtccagcccggtcgccggcctcatcttgtgatacggcgtgccgcgccgccccgacgccactcacggccggagacggtgagcacgtcggactccgtggacgacgaagacagactctccccaccggacgggtactcgtcgtaccgcttcttggccccgcctccgcccaccgcgagcgtgagctccagctccgcgtcttcgtcggtttcctccgccctgtcgtcgtcgtcctcctcctccgcgctccgcacgtactcgacgactggcgccacgacgtcgaggccgagagcggtgcgcggcgtcggcgtcggcgtcgctgctgctgctacgtgtccgccgcggccgagagcggcgtagaggcgctcgtaggcgcacatgccgagagcccctctgctgtactcggcgcctgcgcacttccccatcactatcacaggagcatatcatatcctctttatttggatgaaaatcaagtgacataacagttgctgaatggcccgtgaaagttcgtagtgaatagtcagtctgcacgtaaagaaacaattagacattagtgttccgagctgtgggacacctgatgcagtattgccaggaaactaatgaagggcatacattatctgcatcccaaacccgcacagttttgtcaaaggaggatgtagcaaggcgtgacatgcttgggctaaatctaacatcagtgataagaaacgagtgctcttccagataagatttagggttcagagaatctgtacaccacaaagtgacctgtacaaagaacaggtgagtaatttaagctctctctaaaaattgtgaaatgatagttatgtggtagactggtagtgatcacacctttttatcatgaccaccagtagcaagcagtttaccatca

SEQ ID NO: 8929 - DNA, 972 bp, Zea mays
tgcactgcacagcacacccaatccgatccaaagccggaggaggaggcgtccggctgaagcttcgttccgacaaaaagattccgtcaccggctaatcagatgcagatgctgctggctacctaggttctcttttccttgctgcagaggaacttgattactcttactcctatacgatagcatatgacgccgcgtgccggcagataaacagacttgcactagcatgcacgtccctcttcgtgttcacctctctttctctgtcgttctgaaatctgaagcgagaatgagacttgactgaaagactgaactggctagctagtagctacagaaactagtatagctctgaccaagtggatatctgtcggaggcactcctgcagacggtggtcattgttgttgtcccgcgttgcgtcgccttagcattcggtaaccacctcggtcggtcgatcggtctagcattttttgtcaaagctagtacgggggggcgatgctggacctggacgccatttatcactggcgcgtgattgctgtttagactgacagggaacatctacagttttggtctactcatgctggagatcatctcaggaaagcctccatattccaaagaaaatggttcgcttttgaacttggtaatgacgacaaagacgctatggataattactagttattgaatcttcgaaagtaccatataaggcatcttaaagtaacaccaaatgtcgttatttctttcaggctttggagtgcattagggataaccggagcatgtcttgtttgcttgatcctaacttgaaggatcacaaagaaaaggacctagaaatcatatgtgatttgctctatgaatgcatccaaagcgatccgaagaagagaccaaccatgagggaggtcaccactagattgcgagaagtactgtcaatttcgcctgaggctgcaacgccccggttatctccactctggtgggcagagcttgagatcct

SEQ ID NO: 8930 - DNA, 552 bp, Zea mays
tgctgaaactccttttaagaccaacaatgctcattcagcatcaatcagttgagcacaaatccgatcacggaggcagcacctaacaagcagtaggaacccaaaagcccagcccagcccagttagtgaccaactcaccacgacggttctggaggagtcgcttttgccggggtcgacaaggtaggtgacggagtccccctgcatcccgacgacgcgcttgacgaccgatttgcgcgggtcctcgggggagatcatcagcacgatgtcccccggcgcgacccggccgagcctcacgctgaccctgtccaccgccaccgcgtcgcccgccaggttcagggacggcagcatgctggcgccccgcactaaggtcaccgagcagaggtggtcgttgacgacgtggatcacgcagtaggccttcgccaccaggaacacgcgggagaggccttgcctcgcgatgctccgccacgggatgcccgcgagacgctgagcgaagcccggcatggcggcggcggcggatggcgagggaacacaccggatgcttcgctcagctacctc

SEQ ID NO: 8931 - DNA, 596 bp, Zea mays
ccctactccacgtcgcctcgcctcgcctcgcctcgcctcgccggtaatcgacttccttctcttggcccttatgcaatcggttcgtactccatgctcggattcctctttctgatccctatatacacgccgcgccgattgtatcgtcttaggttgggttgaggctgagccgatcagatccgatcggggccggtccttgcgccactgctgcgtgagctcatctcggtcgcccgcctgctcggctcgatcggccggggacggcggcggccagatctgcaatggagggcaacaaggacgacgcggccaagtgcctgcgcatcggcaagggcgcgctcgacgccggggaccgcgcgcgcgccatcaagttcctgtccaaggcaaagcgcctggacccctcgctgcccatcgacgacctcctcacctcccttctcaaccccgaagacgactcccaggcttcttcgccatcctcgccgtcttcaccaccgcaaactgccgcagcaggggcatcggaggcagttgaggctgatgggctgagagagaggaagcacaagggcaagaatagggaggaggaggcgactcctggggtccgagcagtgtcg

SEQ ID NO: 8932 - DNA, 474 bp, Zea mays
tgaccggcgttaaagctcatgaaattaaggtcgcgttcagcacttcctcacctaacttggtcccgacaagaacgaccgggacgtcgggcgcgaatctgcgaagctctggcacccactgtttcgttgttcaggaacagaatggtcagttcagaatgctccagccatcattctgagaaactgctaggtatattctgaacagaatggtcatcattctgataaactgctccacacaggcacttgctctacagatctaaaattccaaggctttccttcctggcttctctatctacaatcacaagcacgtgctgatcctaccaccataccttcttaaggacgttctcatagctcgccctgctgatcaaggagaaggccagcacgaacacgtccgcgcccctgtagctcagtggccgcaatctgctgtagtcctcttgtcctgaacggaacagagaaggaagggaacacattgatagagca

SEQ ID NO: 8933 - DNA, 475 bp, Zea mays
tgcatcaaaactatgggaagggtgataagcatgtgcagcaacttgcgacgacgagtcaactctggaagcttgtttgccacccaaccaatctatgcttgcaacattagtttgcatagcaggtgacgaggcaccgacggaactgaaaagaaaaaggggcttcagtgcaagcttttaaaaaagaatgacaaaaatctgtagaaaggattatttcttgctttatgaattccgtacagaaaaggttcgcattgacgttatgtaactacccgcagccgcggaaaggtgccgggatgtgagcaagatcacaagcagagataacttggggaaatggacgagaaaaggttcctctccgatttgattcctttctagttcgttgtctgggttctacctttgcatggcagtggcttataagacagaggctaactctaccttgtgtgcccatgcatacatatgacataccaacaccaaatatgtatac

SEQ ID NO: 8934 - DNA, 568 bp, Zea mays
tgcacccaggcgtgtgatcagcactcttctcgttcccagcctgcgtttcatcagccgtgctgctgcctccgcagccctgaaccagtctctcatagttcctggcgccaccgtcgggctgcagcgccatcagctcctgcaccgcaatgcttcccacggcggtgttcttatgggccaagcaagaatgcagaagagtgcgccacgccaccgcgtccggtgcgaacggcatcttccggagcaggtcgtacgcgtcttgaagcctccctgcacggccgaggagatcgatgacactgatgtagtggtcaagcgttggttccacgccatgcttcttggccatggcatcgaagtagctcaacccctccacgaccatccccgcgtggctgcaggatgtcaggatggcgatgaaggtgttcccgttgtacatcccgagctccagcgcacgctctccagccgccagagcttgcctcccaagtccgttctgaccaagcccctgaatcgccgagttccacgacacgacgtccctgacagccatttcttccaacacctgctcaagatcaagcgtcgcgccgca

SEQ ID NO: 8935 - DNA, 631 bp, Zea mays
tgcgcttgtttgccccaggccccagcgaatgagaactgttgaatgacacatcttgagaagatacccaaggagtgaccagattgaagcgtgtaatgttgcaattacaggcattcgttgcccatgccgctaaactatatacaaatgcggaggggaactgttatttacaacttaaatcacacaaaaaggtactaagaaagcacggaaataagataattaactctgtgtcacaagaaccaagtgaacaacaacatatctccattccagcaaacaacatgtgagcctaaaactcggaaaaagatcaatacaatgtgcagggaaaacaacggcatgcagctaattcccagcagaatcctcggtggccgtgcgcctccttagcttggcgcgcgtcacacggatcgtctcctccatcggcgtctcctcgagcgcagggtcaagctcttccgcgccctctgcagcatcaccactgacctcatcgattgccatgttgtctacttcttcggtctcagaaagtggtggggcactaggctcggattttggtgaatctgcacttgtggctggagtttgaactgggtcgacagcaggtttgacctcacctttctttgggctaccgccaggttttggtgtggatgca

SEQ ID NO: 8936 - DNA, 595 bp, Zea mays
ttcagcatcgcggagatcaaagcggccaccatggacttcgacgagtccctggtgatcggagtcggaggcttcggcaaggtgtacaggggcgagacggacacgggcactccggtggcggtgaagcgggggcacgcagagtctcagcagggggccaaggagttcgagacggagatcgagatgctgtcgaggctgcggcaccggcacctcgtctccctgatcgggtactgcgacgagcaggacgagatgatcctggtctacgagcacatggcgaacggcacgctgcggagccacctctacgggagcgagagcgagagcgaccacctccccgctctgacgtggaggcagaggctggagatctgcatcggcgcggcgcgggggctgcactacctccacacggggctggaccggggcggcgtcatccacagggacgtgaagaccaccaacatcctgctggacggcagcctcgtggcgaaggtggcggacttcggcatctcgaagcagggcccgccgctggaccgcacccacgtcagcaccgccgtgaagggcagcttcgggtacctcgacccggagtacttcatgaggcagcggggaacgg

SEQ ID NO: 8937 - DNA, 583 bp, Zea mays
tgaggtggagatgatccgaagaagaggccgcgtgatcaagccggtaaaaatacgtcagatgcctcaaactcgacatacaagaaggtacccccacttgtttgatccacagcagtttttctttctgtaggcgtcaccaaattttcaactttgacacgtgtttctttctttctttctatgtgtcatgtatgtaggttgaaatgttcgtgaaagagcagatcaggccactttgcaagagtgcggtgatcacggtcgatcaatataagtgggctgtcgcgaaaacaactgacaaggtaatgagcttccaccgcgacgccaaaaatgcgaactttttgatcaaggagggtgacaaggtgaggaagctcgcgctgcagtacgtcgaggcatctcagcagaagatcagttgagaccctttaccggatttgaaaaatgtgatcacaatagctgccattgtttcctcgtgctggagcaagcaatccatgtaaatgactgggtgtgcggatcacttggtcaacaaccgtgtacaggccacccttcccgtaaatacatctgcttatgcattttgacatgatgaacaagtgcttca

SEQ ID NO: 8938 - DNA, 587 bp, Zea mays
gctgttttggtacctatggtccatcaagcatttgttcgcttttcgagcaaacggtactagtcttacactttttcttgcagtgattatagcggacatggcttatgttttgttatttgcagaatgtgtttacagggctcgctgggaagttcatcatgggaggcatggccattctggaattttgctccgtcttcttactttcagaacaggtcagtctcaaattatttgtttctttggcatgctgtatcaacaatactaccaagaattgattattcgttgtaatttgtaaacatgtttgtccactcaccatgttgtctataaattgaggagctccatgaaaatcagcacttacaaagaaaattttgcacttggtgcctcacaatcatttttttctcaaaaagcgcaggagaactgcgccccataatataataagaagatataggaaaaggtctaaagaagaccagagacaaaacagcttccttacggaggccagtagctagcatacaaaaaagaatccatcaaagataaacaaggaaacaccctagaaatcagttaatggggcagccagagagcataggccttttgcccca

SEQ ID NO: 8939 - DNA, 607 bp, Zea mays
ttccgtttactctagaggatccccctgcccgtgttctgatccttgatggaatgtggcaaaagacatgacttgagagagaatggctccatcctgaccatggtgaacaccttctgagcgctgcttgggacagtagcagaagctgcaacacgaagactaacaggaggtgaagcggcatgcccaccatgagctttcagttcaaaccacttctcgaaggagagcttagaatcaggccctgtcaaatcgtgcagtgggaaagaaaccttccctatcggttctggtttctttgataattgatcaaccattactgcaagaatgagttctccggtaggttcacactgtaaacaaactccggtgttcttccctgtaactgttgagatatccaacctgccgccgtcactgatgaacatatctgattgattcttggcgaaccgtacatacacattttctttttgaacagcagatggtaaattcttgatgtctacaatttgtaaatataactgcaaaggatagagatgttcaagtcttaatttagtacagacaccttggcagaagaattgcttgcttcagagtttacggaattatcatatcagttatgtatccagaaaca

SEQ ID NO: 8940 - DNA, 669 bp, Zea mays
tggtccacgcacgggaacggcggcctcagcccgcccgtggccgcctccagctccgccaggcgcacgtcggcgtcggcctccacgaacatcaccccctcgccggtgcagtcgacggcgagcttccgcccctcctccacctcccgcagccgccccgcgagcgggtagtacgggactagcgcctcgctgagcgcgcggcggacggtggccgccgggtcggcgttggtggcccgtgacccggacctgccgcggtagaagaacatgagccgctcgtggcgccgcagaatggcctggtcgtccaggtccgacaggcgcttggtgtcgcggggcgtcggcgcggcaggaccgacgagctccgcctcgcgccggcgcacagcgaaggcgagcgtcgacatgcctgcgcgagcttcaggcttcagcccttctttctttgcttcggtgctgaatgctttgaccgcaaaatgtccggagccaccggtggctttgaaaatgtccttccctgtagcaaagcaatcaagagcttcgatgcatggctatgaaaggtgccttgttggaccttgcatctctttctgaaacaaataaactatgctgatctcagaaggcaaaatcagtatgacgagttgtggtgtggtggacacatgcaaccaggcagagaaattttgtgcatgcaga

SEQ ID NO: 8941 - DNA, 602 bp, Zea mays
tgctcttcttcaccacgtccagctactccacgaggaagggcatcgagaacatgggcatcatggccatggcgtgcacgctgccgctcgtcctcgtgcacttcccgcagtggggttccatgctcctgccgcccagcgccgacgccgacgaggagcggtactatgcctccgagtggagcgaggacgagaagagcgtaggccgtcacagcgcaagcctaaagttcgccgagaacagccggtccgagcgtggcaagcgcaacgccgtcgccgtcctcgccacggccgcggccacgccggagcacgtcgtgtaacaactagcgtacgtacttgtaggttctgatcgagcatacagcaaactgtgtaatgtactctagcagtctagcttgctccgatactcctgcttccaacaaaattatgaaacataggctaatatggatcggtgtacacgtacgtcgtagtatttcctgtgcaacatacacaattcagtaaatgaacaaactttgctcatgtgcattcttctgcaaagtacaaataaaaatcaaacagagaggccaggacaacgtctatgatctatcaacttggttgttaaaattaaagaaaaccaa

SEQ ID NO: 8942 - DNA, 664 bp, Zea mays
  unsure (1)..(664): unsure at all n locations
gaccatccatcgtacctggtgtggtatgttgttggggcaaccatgatttctctttaccattttgcttgcttattataggttattatctactgctcagatggttcagcctcactctcttctttagaacatctccgcactctctcaggatctccaagaaccatccttaggatgttgattcacaaatgataggaaacatatacgtcttttactgaccatatgcttgctgacctattattactttctcctgggtacctccgtccattgtccagatttgtctgtacatgctgatttaggtggtggttttttttggtgacctctctcactctctttgagcctgacccactccttaaagattgtcatgtagcctataataatatctggtgcctcgcttccggaaatcatatcattgtggtacaactggaatgctcttgttgccgtctttttttgtttcgtctgggatccacaatctaggtggagtgtaatactcaagatccctgttctgtgaatactggcaaaacaaaaaatatatatacctgtctagatgcgggatgccactaatttaccaaaaaaaaactggtggtgattggatgtgatgaacagaaaagctgtgctagtcattctctaattcagggggatcctntagagtcgcacctgcacggcatgc

SEQ ID NO: 8943 - DNA, 608 bp, Zea mays
tctgcctccggcttctcgctagatgcaggcacgcccgacttcgccgccagcagcggcttgcctccgccgggggccgcagccttcgcagccccccgctgcctcttcggcctggcttcatgaagcctgacaaccgcctggcgcttttgtgcagctccctggcgatccttgtccatcactgctgacacaacagcagcaatattccgcccgtaaggaaaaactctccattcacgaaccatgcgagatgtaaaaaagtcttcgccggccgtgcgggggataggaacattcctaggccaacaacccccggtaaccctcagcatccgagccgaagactcccggagctcgggcgaagacatccttccccccggggccgcgcatgtcctcatcaactctctagcaaaaccatcggaaaccccaagtcctcccatagcagtacctaatttcctctttttagaggatggggcggccgccagcgcagggtcgtctctagtctccaccaccggtttcttcccacggcggtccacatcgtcttgaccaggatagccgtcatacggcaattgattcaattcaaaaaccctgttcaaacggtcattcgacccgcggatatccca

SEQ ID NO: 8944 - DNA, 646 bp, Zea mays
tgaagccgagctgcagtattttcacctaactttggagcactatagctcttaatttgttagctttcgaacttacgatgttgcagcgagtttatagagctatattttgtcaacaagttctattaacggaggtcgacttgctatagcatgggattgggagaaaaccttgctttaaatcggtccgtcaagcagatgtgcactgaaccctgtttagatggctgaaacttgctttggtttttggggagaagaaaatatcccacgtctctgttgtgtctcactagtgccagtttgagctgcagtattggatagaggtctaaataggtggtaaatgaaagggtacaaaaatggaagaaggaagaaaaatcctgtttttttcctcccacgttcagtcctccttatctaccatacgctgcaatctcctagcatcttctatccctgcgtgcacgcgtcagtctcgggtgatcttactttaacgccacctcctacttcctagccaaagcacgatcactcctttggaaacctccagtcctcacgcaagctctctggaagtccaaaacgctgggctctcaatactccttcctccgcgtcatctccctctcctcctccccaacgctggagcagcagggggatcctctagagtaggccgaag

SEQ ID NO: 8945 - DNA, 635 bp, Zea mays
ttggtttgggaagaaaccagcacgcatccgtcgctgtcaggagctgatcagatcggctgctggagttaagacggacggacggcgtattatggacggggaagattcctgatgagatggcgacaccaaaactgaaagccacgggcctggatcctcttctctctctctctctgtctctctcgattttctcccggattttcatattactattctctactagggatggatggtgtatgtacacaccgatacaatcaaggaccgtatcagcaggttgaataataacaacgataataatctactgacacgcgcaagtattttggggctaatcatcggggtggatgctgcatgccgacgaggagatcgagggggaatcggactcgtcgtcgtagtcgtcctcgtcgaagtcgtcgagatcgtcgaagtcccacagctcgtcttgctcctcctcctcgggcatctgccactgctcttgagaaatctcgccggactccagtagctccaccacctgcccattggtggccatgtgaatccagtcagttaagtaccaacagtgccaaatttaataaacagcactggagcttcaattgaccggtccagccgtccaggtccaggaccaggagtaacctctgccaacagca

SEQ ID NO: 8946 - DNA, 591 bp, Zea mays
tgcaagtacatcgagaaggccttcacgcgcctctgcaagggctccggcgacgacggcgcccccgtcgtcttcctcaagcacaacgtccgtacacactcacaggctattgctgtgtgcagcatataatcgggatgcagcgcaacacgcgtggttgatttgggggtaatgccgcgccgcggatggtgcaggtgatcgacgagtacgacgagcagtcggaggtggcggaccggctgcgcatcaagatcgtgccgctcttccatttctacgtggacggggtgctggtggagtcgttcccgacgagggacaaggagaggatcatcgccgtcatcagaaagtacacctcggtcgagccagagccagaaccagaacctgagtgagtcaccactctctgatctgctttgatttgacaaagataccatcagaattcagaacccgatcttgaaccaacgatctcaacgactaagatgtgaagatttttttttccccgaatatgtagctgagtgtggataagtaagtgtcgatcaacgatcaacgatcgaagggacgcattttctctctctctgaacatgaacacatcgctacgcttttgca

SEQ ID NO: 8947 - DNA, 610 bp, Zea mays
tgcaggccgtctctagaggatccccttggccacgtgagttacagggtttttacttgtggtgcctaaaattttatgtgaccaaaacaagtaacaaaatagttttgtttgtttctgcattttgttttgtggagactcagttctctaagtcaatattttataatcatgttccagttaaggatgccttttattatgtccgaataggaatgactgaatgactgctacttgtatttagttcctcactatccattgtgtgtgatgataaatttctgtctccaggtatttgaaccatttgggcaagtggagcttgtacagcttcctgtagatccaatgactggattgtgcaaaggttatggttttattcaggtaagttttttccctgaagctccaccactgaccatgtctgtgtttattcttactatgttgtgccatgcagtttgcacggcttgaagatgcaaaagctgcacagagcttgaatgggcagcttgatatcgctggcagagttataaaggtagcatttctagcagtcatgtggtttatggaacagatatacatggttgacaatagtccatccaattaagatcattgtttttccccttaaaccaggtttcaa

SEQ ID NO: 8948 - DNA, 603 bp, Zea mays
tgcccgtacatcgagctgccggaggcggacctcacgacgtcggcgttgctgccggtgcagctacagttctaccacgtcagtagatgcgccatctatctcatcctgcaaactttaaatggattcgttttttctttcaagtctccttcacgctacctctgagctctgattgctgaaatttctgcattgtctgtcgatgttgtaacaggaagccggcacgaaggtacgtctcgcgattactcctatattttgttgcgttgcgttgcatcccataaatggacatgacgaccgtgcggctgatctgctctcctcgatcgaggtggtggtgcagatggcggtgttcatgggctgcgacaacggagagatcgaggtcgggttgtcgtcgagcacctcggcgccagcggtggcgacccacgtgcaggactcgctcctggaggagctcatgcaggcagcgccaacggtgccttcgtcttcatcgtcctccatgccgtccctctccatcgggagccccgagtactcctcgctcatccgctcaatggccacatcgtctgctgccgcagcggctgccgccaccggcaccaccgagccatcttctcaacaacggca

SEQ ID NO: 8949 - DNA, 594 bp, Zea mays
cggaccgactctagaggatccccctgaggtctcgtacgcccctctcgcctagctctctcgtggaggcggaggcggaggcggaggcggcgcgtgagcgcctttaatggaggtggtggtgggtggtggcttcctccctcgcgccgcgctgctctccgcactccagtacccgcaaccgcaacacttcgccgagaagccaagagagaaacagttatgaatgcgtagctgggctcccgcggccgggcggcgcgatggcggcaatgatggtggcctggtgacttgaggacgggtcggacggagggggagaagacgtggtggtgggcgcaatcaattccgcttcgcgttgaggtcgcctacgctttggttgctctgctcgctctcactctctggtctctgctccgccgcgagctcgaccactacggcatcactatcacgctacttccctcctccagtccttccattggcttcgctctgtttttctgatgggcttccgaattctttagtagcttcgtgctcggattcatgctgcgtggcaggctaggaggcgcaaacggctttccgagcctgaggctcgggtggggccgaggcacctgggtc

SEQ ID NO: 8950 - DNA, 597 bp, Zea mays
tgcagcggcgctgcttgacaatttcatatctctaaacttatgacagcagtggtaacaaacaaaaactccagaagcatctacataaaattccccacaagttttgtattcaaatgataattaaattccaacatctaaatacctccaaacagtccataagataccccctgcattctgtttttggacagcaacctagccgggttcaaacagcgatatctcctaaaatacagctccgaatcgagcgcataagtactcattggaaagatatgacaaagctctacatgattctcacactgattaccactaatcacccacgaaaaatccccagaaactaatagtacttctgctgtttgcccaccaacaaaatttctggacatcacctctaccgattcgcataggtaaacatataaccaaatgaattgcagcacaaatacatagataacctcaagatcaccttgagtttctccttccctccttccttcttcccaccaattctccacttgaaagcttgcaccaacacgaagaagatccaaacaggaaagggctgcacatggagaggaggatatgggggtggcggctagggttgtgggggggatgcaa

SEQ ID NO: 8951 - DNA, 651 bp, Zea mays
ggatactttccaatgatgatagtcaacatcagctcctctttagttcaatctttccaatgatgatagtcaacatcagctcctctttagttcaatctggttcatttttattgctgctataagaagttctacatattgttgtggaacttatttagttagcatatttgttatagatggttgaaccttgagatttgttgctacattaattttgtgcaattctcgattcttgttcattggcagtagagcgtattgttctcaccgatgtcctggatagctgtttgaaggtgcaggaaacttgaagtcttgtgattattgttttcctgtgtggctcacgttggtaatttgttagtgtgaactgtagtattaactgttcagtaaagcccatcattttgacttttcagtcaacaacactgaacccttgttgcctgcatgttttgcagcatgcctacagagatggccgcttggaagaggtaatactgcggcatcttgatgctgatgatggaagtacagtaattgcaaaaagtatcaggtatctgttctctatcaagtttctttgtattcttgtattttcaccctcaacttaccctctcaccttcatgtttctcttccaggttatcagacttccttggtaggatggatctttagggaccagca

SEQ ID NO: 8952 - DNA, 629 bp, Zea mays
actctagagtatgcctctggaagagttcatgttgttcattccttattgccaccttttaattttcaagccctgcttgttgtatacaatatcagctaaaagataggaaaaaccttcttccattcttgtattgtgtagtctgtctccagtgcagaagttttattgggcattgaagctgcacatttattctgttactacactacagtaatgtattaatatttctcatgatggagtgtttttattaagtgacagaaaaaatgctatgccatgcatatctttgcatcattgcatgtgcattttgttttctgaggattaacatcatcttttgtgtggagggttggtgcaggggacactatagtacgatgaaataatagatggcttctccttaacagcagtgaaacttcattaacatttggagttagaggagacagtagagtacataatagatggcttcacttcattgacatttggagttagagaactcacttgtgagagacctgacttggcacatgtggttatttttaagcctgaaaaatacatttaaatggttttgaatcagttcctgggggagttctaatgctaaggactagttttcattgacaatttcaaatggaaatagggcatgtgctgca

SEQ ID NO: 8953 - DNA, 571 bp, Zea mays
tgcaggctatttatggtaaaaaaaatctagcatatcaagtgctaaagtccactgttaaaaatgtaggaacattgaataagaagcaactttgtacaagtcatgtctgttactgatttcctacttggaagacaacattttttttaccaaatcagcaggacgaattttgatctgtggggacaatcattggcaatttcagttttgcttcattgaattgttagagtattcctctatcataattggaagaaaaagaaataaagcaaaagttttaagcttctagaaggaaggatgatatttagtcattatataaggcaaacacaatcatgttccttatagcttctataagcccttttcttttcttgttgaaggctgctgcctttcgagcattgcttgtagtgtgagaaattccttaacagcatattataatgtagaacatcgcaatatttgttcacctttactatgtaatgtatgtcagagaaactttgaggcaactctggcatcaaaagcacttctaaatgaagaggcggtagtagcagcggcagccgcagaggctgtgctctgaaagagcaaaggg

SEQ ID NO: 8954 - DNA, 634 bp, Zea mays
ggatccccctggtcggctgatcaagcctggcccgactttcgatcaattgttgtctaaatacgtgaaaaagaaggccggccccagtgaccggccaccaaagcgaccccgctcacccattcatgagcaacgtcaggtcaggccgattggaccacctcaccaatcggaagaaatgaaaggtcctattgtacaattgagacctaacatgccgacatggacccctccacccccttatccatctatgccatatccatacacatacttacctccaccatatgtcccaaatcaaatgtggggcatgccaccatatccatttgggatgccacagtaccccacctggggggcaccccaaacatccgtttttgataggttggcgccgccagtgcaagaccgattgagcgctgctgaatctggtcaccaggcacaggcccaacaagattgccggactactcggcctcctaggccgaccaatccggcaggggggcatatgcctgtagcaactcaaagaacaacaaaaaaggacatcatcaaaataggcactgcagatgttgtcatacagggagacaataaagggccgatgattttcggcgaatcggccaacacaaccaaaaaaggatatacggctaccatcaaaaca

SEQ ID NO: 8955 - DNA, 592 bp, Zea mays
tgcacgagaaataagtgttatcagcttacctcgcatgctacagtcacaaccagcacaattgcaaacaatttagttagctaatactgtgccaaatcataactcaggaatcacaaaatatgtggttgcggagatacatataaattcagggcctcggattccaataataatgcgttaagaaaatcacggtaacatatcaaccacagccccatagcgttcactgaaacgcaaatctaaaagaaccccacccgaatccctcctaaaaccctaaggctcgcagaaagcattgggcaagcacaacggccacggccacgtacttgtgtcgacgatatcgcggtgggcggcgacgtcggcgagggactggggccggtacttctcgacccagggcgctgccctgccgccagcggagagcagcgccttgcccttggccgccgcaccaggcggcgggggaggcggcgcggctgcatcgatgtccatgggagcggcggcggcggttcccgccatggcgtagcagaaaccctagggctggcaggcgggattgggggaaatggttggcggcttggcgccaattcgaaaccctctcgctgtgttagga

SEQ ID NO: 8956 - DNA, 604 bp, Zea mays
tgcacaggccttaccctcagcgactacaggagatatagcaccagcttctgaaggaactgtttttgcattatgaactggagctgtttcaatttccatcatatcagcacttttgacatcatcatactgcaccacaggtaccttaggagaaccaatgagctcccctggttcttttatcatatcagatgtatcacagatctccacacttccaggaaccttggatgtcccactagagggtgaaagattttctgtatgtgtcacccctgtgggagaaccttcaagagtagttgcagcctcagtattcacagatttaagttcgccttccaatgaatcaatctcgagttcagtcttttcaatctccttggaaatgctttccttcagtaggagcagcttatatgtactggtcgggccatttgaatccccagaacaagaatcctcgtgctggataagttcaacaagcatgtttccaagggaaataacaggatcatcaccgagctgatctaacttgatcggaaattcattattgaaagttgtgtcatcagcctccaagacatctttagtagagttagtgaccgcatttggcatcatttcacaagatttatcttca

SEQ ID NO: 8957 - DNA, 571 bp, Zea mays
tgttgtaccttttgtcagtggccaagtatgttcttctacactttctggtcttcctttcctgatctatacattaggtatttattttaacacaactttgatatgcagttaaacaaccttgagcttgctgtgaatctggccaagagagctaacctccctggtgctgagaacttggtatgctctattactaagatgccttatgtggattctgttacgttggtggtacttccttggctgcattgatgcttatttgcttgcctagtttttctgtgccgccttttttctgtgtctaataatatattttctcctgtaaactacagtactgttccttgctataccactgaactatgtgaccctaattttcttgagagtcagtaggggcaagtttatcaattgttatagtgaaaacatggaagcaaactaacatagttatgtacagtaaggcaaaaaggagcaacaagaacttaatttatttgaatttgttatcttgtgaatgtttgcttcttggtttatactttatagtcccatttatagtctgaaacaccaataattgaacatttggggtatggaaaca

SEQ ID NO: 8958 - DNA, 520 bp, Zea mays
atgatttgtctctaaacaagtgttatgctataacatacaataaactgtgtattattaactacgtttttgagaaacatagctcccaaacatgcccgaacttgtttgtcttgacttttctatctttttttagagatatttttagatatggattcagtgatcagtttgcctctcagccattgtaaaattagatgttccgagctcaaacattttggtttgccttattttgtatcagcataacgacatttgtgttcccctaccgtgcacatcaaagaaacagcatgaaagcttttgtatgggattttgtactagtaggaaatagtatgcagttattcaaaaccaagcatggtgttcaagtgcgcattttgatttgcgcgtgccttgcttctcggatttgaattgtgagatgtactctcatctcatttatggctcgttccccttcttccaaacacgctcataggagtaggtctaaaccagatttgatgaagccgttcgtttgcagttttcttcagccggtagaaca

SEQ ID NO: 8959 - DNA, 597 bp, Zea mays
ctgcattcttctcagtgtttagctgtgaaatgatgcttttaaggctttgtatttcactttgaagttcattcttcgaatccttgagtgtatttatctcctcaccaagtttctgtataagcacctcagaggactggttttgttctgtatggcgctcaacatccttcttcagctcacaaacagtgtcctcaaggacctccatttccaactgcatctttgagagttctaactccaaatcagatactttctgtaaatactgctgttgctgaaggagtgctgcatccttctccgagttcaaacctaaaatggtcttattcagttctttcagtatgctctccaggtctaacttattattttccaactcactgagcttctttgttgacctgtcaaaatcttgtgtcaacatttgcatttcttcttgcaactgggaatgcagaccctctgtcatgagaagagttgcttcaatttgcatacgcctatggcattcatcttgcagcttgatatggacattgtccgcttcttctttcttcttttcaagatcatgtgtcagcaactgtactttctgctcaatctcatctagctctgagtgtagcttcgaca

SEQ ID NO: 8960 - DNA, 561 bp, Zea mays
tggtttgctgcaacccttgcccattccttctatggtttgggctgacatatcaatggacttcattgagggctttccaaaggttggtggcaagtcagtagtgctgacagttgtagaccgattctcaaagtatggccatttcattgccttgggccacccctacacggcagtctcagtggcgaaggctttcttcgatgatattgtcaaactccatagtctaccatgttccattgtaagtgatcgggacacagttttcactagccagttttggactgaactgtttcacatggccggggttaagttacagatgagctcagcctttcacccacaatcagatggtcaatcagaagtggtgaaccggattataactatgtacctccgctgtctcgctggggatcggcctaaatcgtggttgaagtggcttccatgggctgaatattgctataattcatcatatcagtcggctctaaagtgctcgccattcaaagtagtgtatggcagggaccctcctcctatggtttcctaccagccagggaactccaaggtagcagccgttgatgtcca

SEQ ID NO: 8961 - DNA, 578 bp, Zea mays
tgagccattgttcctaaaccacacgagtctctcaggaatcaggctgccgaacacagcagaaacggagcaccatcgatcgacttcagagtttcatggacgtacgtaccgatgttcatcgcgggaggcacggcgaactgcaccatcagcatgtagcggtacagcgggtcacgggacaggaagccgagctcgtacgcggcgcggacgacggcgatgccgatcagcgggaggagcacgaagcggacacacatgatcgcgacgatcaccgcacgcttcattcccgacttccgaagccctgcacgcacacacatccataacgacttcagagttcagatcggtttcagaacgcgccatcgtctcgtccaggggggtggacgtgcttggatcgccgccgtgtctgattttgatcgaaatagcgcccaccttgagtcaggtttccgcctaggataagggtgatgcaagggatcgtgccgtcgctgcaacagaagcagaccgtgagtgaccagcctgaagaggtgttgacaggcagcagtaggcgatttgaaacactccgtcgtccgatgtgcatgcttaccccatca

SEQ ID NO: 8962 - DNA, 594 bp, Zea mays
tgctgggacgcttcacccgcgacgagttcttcctggactccaagtcgaccatcggcatcgagttccagacgcgcaccgtcgacatcgcgcgccaccgcgtcaaggcccagatctgggacaccgccggccaggagcgctaccgcgcggtcaccagcgcctactaccgcggcgcgctcggcgccatgctcgtctacgacgtcaccagccgccgcaccttcgaccacgtcgcgcgctgggtcgccgagctgcgcgcccacgccgacaagtccatcgtcgtcatgctcgtcggcaacaaggccgacctggcccgcgacgcccgccgccgcgcggtggacacggacgaggccgccgccttcgcggaggagcaggggctcttcttctcggaggcgtctgccctcagcggcgacaacgtcgagcgcgccttcctcacgctgctccgggagatccacgccatcgtgtccaggaagacgctggatgcggcggcagaaaccggcggcaccaccgacgtcctggctctcaagggcaccaagctgtcgcttgctgatgagatatccatcatggagacgagcgccttgagaacagcaagcggcggca

SEQ ID NO: 8963 - DNA, 631 bp, Zea mays
ctgcatctgctctggatccaacagatcgcatctgcctgaattcgacagacgttggatcccttcgcaacccaccctcgcataactgtcgggattctagctagtttgttaggatccgcccaccgaatacttaagcaagggtcacgatgccggttccttatagacccgttttcctctctacagccgaactcgagccaccatcgccattgcagggaggacgacgccatgagagaccgagcatgttgcactcgagttcataccgtggaggaggttcgcaggggacctctggatccgtcagactacgtcgcacgacgacgagaagtctctgcatctatcgctggtgagtcaccttgagttggttcactgtatcattggctttgttttgcacgcactcaagatagaagcctggctcggagcgtcagggtcggacctcgctggtggccgtcgctgtggaatccacagtgcaccgccatctctcctcgcctcgtttttgtttttggtagatcacgttcctcgtggtttgccatcacctacaccacgtttgtgcaccgtctcattctcgggttagggtctctgtgcgggccgcatgcttcttgctagcaatgctgcatcaccatgggtgtccgccgtcgtc

SEQ ID NO: 8964 - DNA, 583 bp, Zea mays
tggtttctaatgtcctttaacctcctgaaaaaatcatctttcaggctttgtgcctgggtatcaaatattttacggtcttcccatatgtcaatctgtaacgttgagaaaaagaatatatgagatgaaacccaaaaaaaatactgtcggaaagcgagatataagcccataggttatcatcccaagtgattaacttactatggatctaagacttatatgagtatgcattactttctaacttttccttaaggattcatcagggcaagtgcaagacataataatgcagaaagcaggataggtgctaacgtgcaagctaatctatactaggtcacactcacacatatctactgatgctaacttgcacaattgcacctcaacagttcactagggcaagtcaaacagtgctttgagaaagcttaacatcagtctttccaaaaggcagcacagaggggaagtatggacagaactaaggaacaaaagaagaaacttatatctaagagggatcacaaaatggtgagaaaagatagtttcattcctttcttttaagtggtgcagcagagcacagcagggggatccctagagtcga

SEQ ID NO: 8965 - DNA, 628 bp, Zea mays
acccctgtcgctatgtctccgactacaaggttccagcccagcactttactgaaataaagtttgaaaatatactgtatattggacactgccatcaccatcctcaccgtcgttacaaccagcagcatcggctaattcttcctggatttcagttctccaatccgttcctctgtagccttcagagcatcgccgaatttgcttatgatctaagagggcaatcaggcttctgtcagtctcatgatggttagatgattgtatcagtaaggcaaaaagtgactgtaaaatggtcttacttcttcgacttcattgggagtcatgatcagcgggggtgacagcatgatgctgtccccagccaccctgatgagcatcccacgcttctcgcactccgtgccaaatatcgaaccaacacctggagttaccagtcgtaataaaatcaatatactgtcaccattaatcaactcggcaaggtttcttctaactctggggatagtgacgaattttgcctcgacatgctacgctaattcataacattaagttaactcttcagagaacaattttgggccgccttaaagttggattacttctgaaatgtttgaaaaggggacatgagatcaataaaacaatgaacccc

SEQ ID NO: 8966 - DNA, 1280 bp, Zea mays
  unsure (1)..(1280): unsure at all n locations
ggatcccccctgcaaggtcgctggccaagcgaccaacagaaaccgcacctgcgctcgcagacacaacacacacagaggcatcacagagcaacagcagccgaggaaagacccaactatctctctggcctcattccaaagcttgtcaagcccaattcggtagacatggtgactactgcaagcaagcctacatcatattcgattgatgctcaagtggtgttcgatgaaatgcagcaagggtttcgaacatggatccaacgacaaccagatacaaggcgcaagagttgttgcccttcattgattgatgctctgcttggtgggtgttctagcattggtgctcattgtgtgcgttacctgcttaaggaatatgctcttgctactaaatttcctgattggatcgggtgcacacagtcacaaaaactaagaagctacagaggcaatattcctgggttaagaccaattccatggccatcctttattttactaagcagagagaataagcttaccaagtcatcagtcatggtcacggctagtgcgattcaggcttttgtgaacttggtcctcactccttgtgatgctggttatttcattgccaagtttgcaccaaattatttcatcacctacatgtcgttccagatgacaggagatctcatgatgtgtttgagcactttaggagcttttggatttagagctgattcctgcaagttaaaagcatgaacaaaaattactagcgaattaacacagacattcacacaagacaatactgagacgttcaaaatatggtgattaaattttctgcctattgccataaaagagataactagtatctaggataataaatgcactacagtaggtttttttaagctccataaaatgtatttagaagataaactagaaatttgacatttgagagcacaagtccttataaaattttttgatgccacatggtgtgtttcttcagtaatacacaggatctcaaaacagaaaaaagaacaagctataatataaggtatataaggtaaggtttacaattaaatgaatctgatccttatcatctcattctaggaactttggtagttccacggtgtttttttaaagattacgacatagagtgaataatctcttgtaaactttaatatgaaatcatcaagtacaatataatattggttccacataatagtaaaaaaagactattgtaaaaacttggcccatggggagagacccccaagggccaaggcattacaattaaggctgttaaaggcccggncgcccggggaacggtc

SEQ ID NO: 8967 - DNA, 630 bp, Zea mays
tgaggcgtcagcagagaaccttcctgcaaggctgcattgatctcgtcttgttgtttctggcccaacacttggtttattgctcaaccttaaccccggacttgttcttctgcaggacagcgggtacagcgctagttattgcttcaccttgcttatctctgctgcagcaactggaggccgaggcttttacaaggagctggggaagtatgggcagaagctgctatcgaatctgaagctttgcttggcacaccagcactggaggtatgtgtttctttctaccatggagatgttccctttcgtgctgttcatcattttatttatgaaatatatgtctctgtgccaggagatgctttcttcatatcgttccaccttgtgaaaatattatggttacacgtttagtaattacatatgcgtgtgtttcggtgcagagatgtataagaaccaactccaggagcttgctcagaggagctgcttcaatctgccgtcctattcctgcatccgggagggaccagatcatgcaccccggtttaaggctacagttaatttcaacggggagatgttcgagagcccagtgttttgttctactctgcggcaggcggagcatgcggcaggggtaccgagctcgaagtagta

SEQ ID NO: 8968 - DNA, 593 bp, Zea mays
tgctgttccaaatcttgatatggttgagggcgtagacaatgaaaaggtaagcaatcggcaacaagtactgttccttctattatttatctaatgtatgtacaaaagatggagactaatagcttaatgcttgttaagttattatttagtcaggttcttgtatctgttacctgcaattgtggatttctgtattaacacatagactccacaactttcagattgctaaccacctagatcgagctgtcaacagtttgggaaggcagcctttgaaagttttggttcaagtgaacactagtggagaagaatgtgagtgcataatcagtattgagaaatcagaactcttatctcttgattaattttcccgaacaaaacacttgtgctatttgtttccacatttgccttgatctgatagattataattgatattctttcattttgcaaccaattgctatatcagaagtcagtttattacttcagaagcataccttaaattacaagtgacaagtttggaaaataaaaagtaaaaaaaaacttatgatcaagttcaaattattatcattctgcaatgtccacattcatctttcatatcattagct

SEQ ID NO: 8969 - DNA, 552 bp, Zea mays
tgctcctactcttgatgtccggctccatcttccttggcctgtcctcgaccttctcagggacgttgcgctgccgcttctcgtcatcagtatcagcttctcggtagtagccggggtgcttgcgtttcgcatctcctgtctgcccgctcctgacgcgatcgccgccggcattggaaacgacaggaggcatcttctcgtccgagatcttgggggtatcagctagtagaacggctgtctcaggcttctgcgcctgcggacgcatccggggagtggacggaggagcggccaacaccgtggtgtccaacacgccgccttgcgcccacttgatcaagatgccgcgtgcgagggcacgcaccttcccgtcctcgtggctcagcaggccttcgacggccttgtccacgccggtggtggtcagcatggtcgtcgtcaccgggaccacatgcagcgtcaaaagcgcctcggccatggccgcgtcgagcagccggcagagccccttgactcgatcggcgtcgtcgtccgcggcatcgcagagcatctccaccagctcgctcctca

SEQ ID NO: 8970 - DNA, 604 bp, Zea mays
tgctactgagctttctacctttctagcccctctcttttcctcagcatcacatggcaatgagactgctgcagccgacgagcttaaactccttgtgatcctacgagaaattcctgcccatgaattagcaatatccccagcattctcatgggccttgcgcttctgcttcctcctagtagctgttcctaccaccttccctctttcctcagccttagcagggttattctgactttcaaccccactgtgagaatgtaaagacgccactttcatcctagaccgtgtcactggggcatctgcaccaacctctctggtaacgcttccacgagcagaaccaccaccatcattgtgtttccgccgccgaccgcttccactcactgctgcagaactaggtgccttcctacccttgcgcctcccccttgtcttggcaacaacgagtgacaaaatcacctgggaccttcgtcttcgtcccttcacctctgacgtttcatccaatgcaaaactcaccttcttggaagccccggaagtgccaccgctagcactacctcccagacgcttcagacagcccttcctcaccaccacaccaactacactaacaggggtacgagca

SEQ ID NO: 8971 - DNA, 574 bp, Zea mays
caaataggaactgaattagtggcattgttagcatgtacatgaaaacgtgatttgtgcagtgctgggattagcttgggaatgtcgtccaaggatggccttatattgtttcctcgcaatttgtggttggatttttctatcccatctttaaagtacatttggaatgtttctaattcttcttggaagatgtttgagaagtgtaagatacagctatgtacgactatgattcctttcattgttttcatcaagttggtgtgaaattacccacctttgccatcgactacacaccttaccttggaaaacaaattattttttactgggtctcctgtccatcttgcaccgttgcacgtaccatctcactggcggcaatcatgcctgaccgttcatctcatcggtgctctggctatggcgacgagacgcgcgtccgcctacgctctgtactacgacgagctctgagcctgcgccggtgccctggccatggcggcgagccgcatgcccgcttgcatgccatgcccgacctggtcgtgccggcccgcctgtgccccgccggtgtgctggctgccacatgtgctgctca

SEQ ID NO: 8972 - DNA, 575 bp, Zea mays
attcaggttagtacgattttttccttgcatgctggattattcactgacacaatgtttgcttctgtgctcttaataagttattgtgtgcagactattgcaattattcccgtgttaccacgaggtgtactgcagctaggcgctacaagtgtggtaagatatccatgctttagtaactgggattactatatagtatctatcattctacatgtattgaagttgttctgtcattattatatgagccatgacatactactttatgactgtgctacattgttgactggtcaaatgttctgttcccttgatctccgtatatacactatattgtggtcaggtctgaggagacaaaacctttttgtggacagtagcggacccctgaaagaaaaacatgtgataattgtgctctatttttgcatttaagattgctgtgaaagaaataagaaaaaaagattctcagatatctctttatgctaactctactaaccatgcttatgacatgttagagcttatggatgcttattttttggcaggtagtggcaaataccaaccttggctccagtataagaagctgtgtctca

SEQ ID NO: 8973 - DNA, 669 bp, Zea mays
tgacgcatatagaatagaaaaaaaaggtctgatttttttttcgcacattttgctccgccgttcccagcgatttcgtcaggtcggcgcggaggctcaccgtattgaccgatgctgggagcgacaaccttggaagctaaacgacgacgaggagcagtgagagagaaccgttccattccagccgcgagggtttatgttcttcggtactggtactgttagactgtactagtactgtacaggtgaggccgggagctaaggttttgttcaaaatccgttccaagtctgaactctgaagacatagagagagagggagagaggtttcagatcgtaaggcagcgccaccatgaccaggcacgttgccttcatctcgtgtgtgtccatccaaaaaatcgctgtaaaacttggggggtaattaaaaccctactagtactactactactcatcttgttccttgtctctctctctgtatcctcgttctgtcgttcattctcatgggcgcttgaatgccccccttctggccaaggccaatgcatctgaacggcgtgtacgggccaaagggggcaaagccgtagcgggagcagcaacactgcgcgcgcgcagacgcaggttttgaatgtgctggcgctgctactgctgccgcaggcggcagcaggggtaccgagctcgaactcg

SEQ ID NO: 8974 - DNA, 596 bp, Zea mays
tgttcctgctgatattgtgttgttatacgggttgctgaaattgtagcacccacttcttggtctgcagtttgttgagttgttttttcaagcaccacttcatcagtagcagcctttgaagatgtagcccgaagttcttttgaaacccaatttagggtcgacgggtcggtggccgccgccacggcaacttaggagctggcggtccctaaggacgccagcgaacttccatctatggcgccatccatcggttggtgaagttcaaactagttagctaaggaggaagaaagtaagagggaaaggggtgacgaactcaccggatttctctcctcggagtcacggcatggtgagaatgacagggggacaacgtttggaggcggcgacgcgacaggacggtgatggcgacgatctggccttaatcagagctaaaagcgcgaactgatgccagtgtttctaagcgggaagtttttgccgtgtcttgttgctatccggtcgaaccccacgccacggcttccataagagcgaagcccagtttgtcgtttgccataatcgcaataatctcggcagtgtttcttcctcgacgtgccatgatgaacggaaca

SEQ ID NO: 8975 - DNA, 622 bp, Zea mays
atgaagaggtatgcacttataattatattacactttaagggcatgattctactttgcacgcagagatagaaatgtcaaatgtttctttagagtaaaatattttgtgtattgataggtcccagctcttcttcaacgaaggggagagggagcttctattgaatgaaatttctgagcttcgaaatcaggtccctactgaaccttattttgtaattctagtaggtgcacaatactgtttattttacaaaactttccttgccctgacaggtttcacaaatacttgaacagaggacagaaaccgagcaacaaaataccttttctgacaaaactaaggttaaattcatatttagttctcactgcacattcgttctccctacaaacagattttttttaaacctctatttttatgttcagttgaaaaggaccagccaagaagtagaaacatgtagaagcaaccgtcaagtttgcttagaatcgaacatagcactaacaaggtaattgcatatttgcaaaaaaaaagttcttggttggaatttctgttattgaagcaagtaaatcacttcacagggaaatagctgatcttgtggaagagaaaacagcccatgcggaagctgaggaaaaacca

SEQ ID NO: 8976 - DNA, 607 bp, Zea mays
ccccctggcccggaccccggggactgtcaaaaggcgcacgagtaaaattaaccagtctcgaaagagccctgacgattgggtaattgagttcaatgtaccggtagtgacaatgcctcgtacttggtacaccagtgcagcctctagacacacatcggactgtgactctgtgagtgtgcactgggcagggcaaaactgggagagagagagagattgtgactgcaattatgcatgaactagttggatgtttacggcatgtttaacccagtgtttcgtctttcccaaacgagtagagtcccccgccgtgccgagaacgacaagagatacattctggcagccgaggggtaacggcgtcaacttcccaaggccaggcggttgacgtgcttgtgatttcagatctccgaagatatcagtgcccataccaaacggcgacaaaaagcgtcgacgcgagaagtgggggcgaaaggaacgggcgccatgcgtcatgcgctccacgactcgactcggaaagatatcctggagccgggagctaccacggcgccacaaccagctagatagcctagattcatctgccagagcccagagcagagagcgatcaccgtcgttttca

SEQ ID NO: 8977 - DNA, 721 bp, Zea mays
cgagatccccctgccaccttctctgcctccctgcgtcccccgagcaaagcagaacaaggggggaaaaagttgacatacgcttgcagcgatggttccttgccgcccgcgccgcgctcgtgcgcgtcctccctccgcgaccatcgccgacctcccaaccgaagcagctcaagcaaggtacgtttcgccgccccgctcccactgttcgggtcccgctcgaaatgccgcgacacagagctaaaaccctagtttcggttttgcaccccaaggtctaggcggccgcggcgggtcctcgctcgccgttcgggcgaaggactccgatgacttcggggcccttctgtcggagaagctcgatgcgcaggcgcctgagaagcgggatgggcgggatggttttgggagggaggcgagtagcgtggaggaggagaaggaggtggtggaggtgcagggcgagccggcttcgtggggtgtgctcaaccagatcggcgtcgaggtgagcgcgcgcatccgattgcttttaaacttgtcgtgttgccgtttcaaaatgtgtgtgctggattgaggtgaaaatgttttgtacttttgtgtgctcgacattttgttactgaaacaagaggaaacctgctctcttcattcagtaccttggttcagagaacaaggtttgtagatatcgcgtcagtattcaaatgattgcaaacctacagggggatcctctagagtcgtgccg

SEQ ID NO: 8978 - DNA, 575 bp, Zea mays
cccctgacgacgctgattgtcaagctcctccatcgtaaaacggtggctcctctccaagatggtcagcgagttgctggaatctcggtacaatctgtccaggttgtcgcgagaagcagcaaggatgcgtttttcttcctacaagcaaaaatcaactcattcagaatccaagagcatgataaggcgaagcacgggttcgtaagctaccttctcagagtcaagctgagcatgaagagaagaactcagagcgttggcatcatccaaagccgcagagacctgactcaactcgatctgactctgagaatacttctcctcgaagtcagcgcatcgtcgagccatttcagcttgatcttgggaatgtttttcttcaagaactgtgatctgccgagtcatccctatcaagaggtattcaaacaaaatgaggtcagaaggtaaaacaatccacggacaagaacaaagaagaagaagaaaggacactaaccagcattagttgcctccaactcagatacacgaccccgaagcaacaccggattccaacgctcaagagatgaagccacctccgggatggaagcaccctg

SEQ ID NO: 8979 - DNA, 574 bp, Zea mays
tgatttttttcaggatttttgggacatcattaaaaaagagatttggaacttgtgtgatgactttagtaaaggaattttggatattgaaagactcaattatggtctgatcactttaattcctaaagtggataatgctatggaaattacaaagtttagacctatttgtttattgaatgtcagttacaaaataattaccaaaaccctgaataataggttatctaattgcattcaaaaaatcattagtgaaaatcaatttggttttgtcaaagggaaatatattctggactgtgtagttgctttacatgaggtagttcatgaagttaaaaggaaaaagcaaaatgggattattctcaaaattgattttgagaaggcttatgacaaagttaactggcattttttatacaatatgctccagctgaagggttttggggacacatggagtgattgggtgatgaaaacagtgagaggtgggaaagttgccattagaactaatggtatgattggcccattttttcgtactcataaaggggttagacagggtgaccccttttcgcctttattgtttaacattgca

SEQ ID NO: 8980 - DNA, 612 bp, Zea mays
gctaccggcgcggccgccgctgggtgctctgtacgccgccagcgggagggatgctctccttgccgtccgcgcgctgctcttgctcagaggcgtccttgagtccaactacacaacatataacccaaaaatgggtcacatatacagccatgtacatgcaaaccagcgatgcagacaaagatccctactactatacctcggcacggttcgttctggcataggacgtcttcggaggatccagccggcttctagccgccaccaacgtcttagatgccggagcacggctcttgctgggagtccgtagaacgcctgccgtcttcgtcacaacagccttactcgtgacctcgtcgtcgacctgcaggctgctgccgacagagagctccctggcactctgggtcgtcgtcgtgtactccttgatgctccgcgtggagctgacggagttgcgctcgggggatggcttgcagaacgtcacggtcctctcgctccccagagagctccgtctcgcagccctcctcctcgcggaatcggcggtgtcgctcacgaacgtcatcttcttcactttgtccgtcagagcttggtagattggggacgtggtgcgagaggggctggacttca

SEQ ID NO: 8981 - DNA, 573 bp, Zea mays
tgagaagatggcctggagttgcgttggtctcagatgttacactctggtgctaatatctcagagtacgaacatttgcacaggactggtctatttgaatcctcaaatgcttgtgtattattcatgtaaatacagcagtgtgtgataaaaatgacaatagacctgtgatatagtatttcagctcattgttcatgtgactacaaactaaataaagtacagaatacacaagtaaatgaccggccttcttgatgaccttattcaacgaagagagagagagagagagtgctttgacagatggctaatcgtgactatgggaacaaaaattgtgacgccaactattcactatccactatccaccatatgatgattgcatccgctgcaacgacccctgatgtgcctccggaataatcacaaggtgctgttctcttgttgctgccatagaacaatcagttgaagtttaacagcaaaactagagcatatcatggaagccatggccaaaaatctcactgtcaccaggaaactgggtggacgtactcccatgtcaaaatttggatggccggtgccagcaagcatgca

SEQ ID NO: 8982 - DNA, 897 bp, Zea mays
aggccccaaccgcattttaatgtgagttaagctgcactacattaaggccccccccaggcatttacaattttatggcttcccggataggtaatgtggtgtgggaatttgtgagcgggattaccaattttccccacagggaaagcagcctatgacccctgagttacgaatttcgagctcgggtaccccctgctgaaaaaacattaaataatttttgggtgaatcccctaggtattccgcaagcccacccggctcccgtaaagagaaagtgacctatattgtacatgctttatatggtggagatgaagtcactcatactttttcatagaaaggcggtactcaatgtttaaggttttcccaagacaatagaagtaacacttgcttgaccaccactgagcttccggctcccgtggtaccattttctttccaggagatgcacacacatttccctgttcctggttgtagtagaaacactaattgtcataccataccagactcgtccataccagtggacacggactattcgaataggtttagactctgcgcagaggggtacactttacccactagtccggctctgcgatcccatggccaatgagactcgaatccgactctctttctttccccgcacgtcctaaccttaacggttataccgtaaggagtcaggccaccaccatgtccaaaccggacaaaactttccccctccttatcctcccggtgctaccccagccttcataaccctggggttggaccgtacgagttcagattgagtgactgcccacacagcctcgagtggttgtactttttgagagaacaaaaaatgaaagatgacaaaccggtccttatatgagaggacgatccttctgctcatgcgtaaaccagagggatcaatctagagtc

SEQ ID NO: 8983 - DNA, 695 bp, Zea mays
ctgctgaaaaacataaataaatctgggtcacaacactaggtattccgcaagcccaccccgttcccataaagagaaagagacctatatcatacatgctttatatggtggggttgaagtcactattctttttctcagagaaaggcagtagtttttagggtttttctcgaagaaatagaaataacacaatacttaaccaccactgagcttcccgctcccgtggcatcattttcttttccagaggcacactcgcacacacacatttccctattcacggaggttgtaaaagactaattgtcataccacacgagactcgtccattccagtggacacggacaattcgaataggtttgaactcttcgcagaggggtacactttacccactagtccggctctgcgatctcatggccaatgagatccgaatccaaatctctttcctttctcgcacgtcctaaccttaacggttataccgaaaggagtcaggccacctccatgtccaaaccggacaaaacattcccccctccttatcctcctggtgctccccagccttcataaccctggggttggaccgtacgagttcagattgagtgactgcccacacaacctcgagtggttgtacttttcatgagtacaggtagtgaaggatgacaaactggtccttatatgaggggacaatccttttgctcacacctaaacca

SEQ ID NO: 8984 - DNA, 626 bp, Zea mays
tggtttaggcgtgagcagaaggattgtcccctcatataaggaccagtttgtcatccttcactacctgtactcatgataagtacaaccactcgagactgtgtgggcagtcactcaatctgaactcgtacggtccaacctcagggttatgaaggctggggagcaccaggaggataaggagggggaatgttttgtccggtttggacatggcggtggcctgactccttccggtataaccgttaaagttaggacgtgcgaggaaaggaagagattcggtgtcggatctcactggcagtaagatcgcagagccggactagtgggtaaagtgtacacctctgcacagagtttgaaaacctattcgaatagtctgtgtccacaggaatggacgagtctggtgtggtatggcaattagtgtgttgttttcaaaaaaaaggtgcgtttgagaaaagtggtttttaaaaggttcggcggtttagccgtgagctatggtggacgggaagtccagtagctgtttttgaaaatgaaaaccactaggaaactactgaggtacctggatgatttagtccaggggatcttgttctaatattgaaaaacttcctgctcctttgggagaggatgcgctttgaaaa

SEQ ID NO: 8985 - DNA, 508 bp, Zea mays
tgaaggaaagtagcctaatgatgaaccaatccgtgcaggagacagagaaggtatttttattccatttagtgctcaggtttctgttctgttgacacagccgtttatgtggataaagttgtattgatattgcaatgatgcactccttcagttgtgtgcttgttgagaatgttcccttatctgccgatgcagatccttgattctaccgagagggccgtggagcacagcctggcaagcacaggccacgcaacctcgcgagctgcggaggtctactcgctggcttccaagactacgtgcttccagtggctgctaatgtttgtgatgacctgcatgtttgtaatggtggttctgctgataaggatcacttgaatgatgaggctgtagcaggcactcaaatcgtagtcacccttgtctttgtttcatgggaattctttgtggtcaggtcatggtatttttccgagcaagtgtccccaaccaaacaagcctgctgtatgagagagaaactggaaca

SEQ ID NO: 8986 - DNA, 568 bp, Zea mays
tgcagtttcagtgaagctgttgccgggcgatgatacgatatgatatgatgtaataggataccagtgccatttcccacccattaaccttaccttgcctctcttctaatttaaacctctgctgcaagggagcgagagagagagagagagaggagaggcacacagcgcgcagagagactagagagagagggtttgtcctcctgcctgccttggcttggctagcttggcctcccctccacctccatcggtgtattacatccgagggcactccatctcttgcgtcccttaacccctccaccaatccaatccaatcccttaaccccgcaccgaatccagacttcgaagcttcctcttcctcccggtcccggccccggccccggccccggccccggagccctgttcttggtacttaggacaaggtaaagatttggttttttcttctccccgtcatctggttcctcttcttcttcttcctggcgctgctgtgttactcagttagttttaatactcgccagacgctccgagaccctcgagattgagagctcgctcggtcgctcggtgtcttcgccag

SEQ ID NO: 8987 - DNA, 1238 bp, Zea mays
cccccgcgggtactttccgtggtcaggaagatacccctaatccaccacctgtaccaccaacgctggctgaggctatcgctgtcttggtcaacacgaatgcagataatacccgctttttacgtgaaatggtgggtaaccaattccagcaccatggcggaagggctcctccctagggaccgcgtgaaacttcatacctggatttctctgaaacgcgtcccccactctttattaaagctgaagatcatcttgaagccgatgagtggatcagggtaatagagcagaagtttggattaatccactgcacggaaacacagaagtcgttgttcgctgccaagcaactaagaggtcctgccagtacctggtggggaaattttgtggcgattcaacaagccggacatcaggtcacttgggatgaatttaaattggcattccatgagcactatattccaaaaggagtgcttcacatgaaacaagaggaattcattcgactaaaacaaggaggggatactgtgatgcagtatctcaacaagtttaatcatttatcccaatatgcaattgaccaagtaaacactgacctaaaaagaagaactgcttcatgaggggactcaacgacctgctccaaaggataatggccactgcaagataacaacagtatgcataaacatgcaggtcaagcattattaccatttcttaaagccatataggctttgcctacaaattgacttcttgcaaacataatggaaatgtaaatgagaacacactcgagtcatgttataattagatttaggatgcaattttgcgcagagcaaatcagcaataaagtccatgtagcactaaatgcaaatctctatacttacatcatcatcatccagaacaccccaatgagcatcaagtacatggttcactgataagctctcgtaagattccacaggataaacatcaccctggacagtgccaaagtcaaaacaaaacatgttataagagccaggaatagtgtgtagactgtaatattgtatcaaatgcgccagatggaaatctgaacaactagcatgctgtagtattagtattagcccaaactccaaactacatattgagcaaagatgaactataactgagactgcaatcggcctgttaatactatttatgtatgtttgtgcactatggtgggtatcatccaacaatacattcccattaacacaatagcacatacatacagttcacacaagttgaatgtacca

SEQ ID NO: 8988 - DNA, 565 bp, Zea mays
tgcatcacagaaattaggaattattgcaccaacatcaatctgctagaacaatataattatgccagaacgtgtattatgattctgactcgcgtcatgaagggacagacataatttgtacatgccatcaaactgtttaaagcgtaaaaatgtttcaagagcaatctacaggttttacaaaaatattacaattcaaatcagtgaccgaagttgtgttaaagactgccttattggactggtagtctggtaccatgtaagtatatgttattaccataaaaaaatgtacagttaccgggaaaatgcacaaaataatatagtttgcactgcagcatacaaaagcttcatttgtctgactggtactttaacccactacctttcaaggaaatttccaaactttttaaaatagtccaatccaatcagaagttcagaatacatggtcaaaaaatatacacgacaatatgtatgtgggtactttgctatttgcgcaaatgaacttaggaaaagtttgaatctaacctgcaacatatgatatttgctgagaattttaagtacaaggccacaaatagca

SEQ ID NO: 8989 - DNA, 573 bp, Zea mays
tggcatctgctcgatggttgctgcaagtttcactccctttgttttagctacagatggggatgaagaatcactggacctccttagacaaaatatctcctcgaacatggagcctaatttgctgagcagaatcatggttaggaagttattctggggcaacgaagatgatatgaaggcagtccgagagcttcatggtaacggcgtgggttttgattgcataataggcaccgacgtgacatacaatcctgatgctatactccctctcttcaagactgctaggggagtgatttctgagaaagctaacgaggactcggtacctgctctcattctttgctacatccagcgacgagttgatgaggactccatcctttctaatgcaacgtcccagggtttcaggcttgtggacaaatggataaatggagttcacgagagtaacggtaccatcagttcttggttctctggtaatgatgtctgcagtgctttccggcatacagtactttcagtactgtacttcgagctgtgaatgctgctatgcatgtgcaaggttactgtataacctgaaggatttttgtagca

SEQ ID NO: 8990 - DNA, 570 bp, Zea mays
tgctcgtggtcccaggcggcgtggccgacgtagaacctcaggtcctgggtcctgatcgcgccgctgttcatcagggcggcggccttctcgaggtccgtccggaagccgtagcagatgcctggcaccacctcctcgaaccccttgaggcgcgcgctgtcctcggtcctcaccaggaacatgctcatgtcgacggggcctccgaagaagaggggggagtcgccgaagggcgtcgcctggtctcggaacatcgggttcacgtgcttgatctttgtgtagagcggacggttcatgatgactccgaacgggccgtcgaacgtgccccttgtaccgagcctgaggaggaagatgacggttctttcgaagatgctgtcgtcgtctagcgcttcggtagcaaccagaacgcatcctgcctctggcatcgtaatagcatgagcccacttttgagggagctgtaatggatctcctgaggacgccttcgactctgatggagtacttggatccactaatagctcctgattcagagacagaagcagatatgaaaaaccccaaggtatatggctgcgctcacca

SEQ ID NO: 8991 - DNA, 596 bp, Zea mays
tgctatatgtacacaatggagaatcataatagtgtgcttgggataagggagtatcctaccatgattacaattacaactctacttactggctagttaatgtatatatcactatgcaagtacatgctccaatggtgcaatgtgtcatagatgctttatctacatatctttatagcctcgtgccctcagatgtatggcaaaacaactattttcctttctaccccatcatcaataggttttataaatctctaaaattgttttttgttgaaaatgggttctttcattagcagtctatttcaaaagctgagaaattcaaattgacacagtgtaccagaatgtgcattggtgcaatacaaactgtagattttgtccccttaatatatttacagatatgctctgagcaaaggagctactgcatcagcagttgatgttcaagaggttatcgatccatcaaagagtcatgaaagtgacagtatatttaaggtttcaaaacacccaaaccaaagaagaggtaatgatgtgcttctgcacaagtatcagaatgggagcctggcacctatttcaggtaaggaccttatagacataatgtgttttcttca

SEQ ID NO: 8992 - DNA, 600 bp, Zea mays
ctcttaggccagaggaccccccctggggcacctactgccccggcgacgacccgggcccgccgcccgagttcgacacctgcctcggggacctctacagcgtcgcgtggatggaggacagcgacgcgcgccgcgaccgccgcgccgagacgctgaggcagcagtacctggcggtgaaggaccggacgtcggcgcacggcacctacagcctcggctcccacgccatggagtacggcgacgtgcagggcctcggcgcgcagagcctgtacacgttcatgggcagcgacgacgccaccgccgcgagcttatccggccgtggccgtgggcagccagccgtgagccagcgcgacgctgacctcgtctacttctggcggaggtaccgcagggcggcggagaggacgcccgagaaggccgaggcccggacgcggctgctgcgggcggtgtcccgccggtcccgcgtcgacagcatcatggagctcatcggaggcctcctgttcggctcggagggaggtcccagggtgctcggtgccgtgcggccggcgggacagcccctggccgacgactgggactgcctcaagtccttggtgcgtgcgtacgagcgca

SEQ ID NO: 8993 - DNA, 583 bp, Zea mays
tgcattgacaacaaatctcaaattttcagggaggaacagacgaaagcacagatgaggtatcaattcaatcagacagtcacagaaccgattgttttgcatatgaaattacggaaactagcatagacttgtactagcctagcgctacagacttcttgaacctccatggtgtggctgtgggcccaaaacaacaggttgtgtctaacaaaaatacatgtcttcctctttgatttgatggaaacagcactaactaatatgcagaagtcatcagctacctcttactggttagtttgcacaagtcatcatctcacaatatgcaaaagacgtttatgaaaagaaaaaaaaatcttccaatacaaacttaaataccggatccatatatctacacatgacgagactgtaaaagtatttgataacacaagatcagataggcggacattcatcggtggtctgtagtcatgtaaacaaggtgcatactgcggatccagtgaaggacatgggcgcacagccgatcttttttttttttgcagaagaagtttaagttaacagtagcagtgacgctacatgtatactgcacagagttgca

SEQ ID NO: 8994 - DNA, 576 bp, Zea mays
tgaatgctgtgctagaaattaacagccatcccatatatcctactattcccatattttcatagggaacttctgagtggcgacaaggagggtcttcttcagctcccaagtgacaaagccctgctgagcgaccctgtcttccgccctcttgtggagaaatatgctgcagtatgtccttggtcattattatccagggtatggagattcatagggaggcaagtactgattatcgtgtgctctgtaggatgagaaggcattctttgatgactacaaagaggcccacctcaagctctccgaactggggtgagtaaccattggttgcacaatgtgtgattggtcagtggaacaaatctgatcgtttactcttctggggtgcaggtatgctgatgcttaaatggtccatatcctggagcgggacacaaactgctgcctgtatggactcgtgcgattcagggtgaaccatcagattgtctagtgtcttctttgtaataaatttatctgttcttggtactttgtctatggttgaatcggaacccattttccgtttgcctagattcttaatttctggtgctgtatcca

SEQ ID NO: 8995 - DNA, 1157 bp, Zea mays
tgcaaaccctcaccaaacgcaaaacacacggtgtcgctatataccctatattcattggccaactgccccggcgccgtaccttttaaaccctcttttcagccacgcatgatctaaacatagactttgcttgcaagacacacggaagaagaaaaaggaaaagaaaaccaggccttttttatgttacaagtctccttgatttaggtagcgtttggttttagggtatgtttggatagggccgtttcgtttctaacttgttgtttgaattgaattcatttatatagaacagaatagtttaaaaatgaaaaattacaatcaaatatagaactatttagctctccaaaatcttctggacggagacgttggctcctgaacacaaaaaaaaaaaaaaaaactatcttactgacgcgcgtcgttggtcgatcgtgtcgctttcagcttttcatccgtccatcgtccgcggtcgtatcgccggataacgcagcattttaggtacaccaaatggcacccacggtgtgcctcaagttacgttgttgacgcccaggagacgctcacctaaaagttttcgttacgtttaactgaagcaatgtgctgcgtgaccttcaactgagtgtttataagctgatcctcgagaacttcaatggtgttttccctggctcccactagctcctcaagctcttggatctgggtggccatctgttctacctgcaggtccttttccaccatctcagtggataggtctaccacaagttcctccctgttatctaaggtgatcttggtagcctccaccaaggccattagctgggagattgcctctcctcgcaccgcttgcaggcggtacagggcattcatgcatcacaccgtcaagtgagcagtctgccctgggtagagagcccacacatccttggcatgctccactcgatccttccacattgggtcgtcctccttttcagcggggaacaaaccaatgggatgagtggacagctccaaggggtgaaagccacaaaaggtcgtcagcccgtggagagcaatggcctcgatagtgtcctcagcccggtatccgaaagactcagagtccaacgaacgccagcctggctgtaagggatgaggctccaaggtcatcctcaccctacagcggggcacccggtgctcctcgaaca

SEQ ID NO: 8996 - DNA, 840 bp, Zea mays
  unsure (1)..(840): unsure at all n locations
tgctcgccagagtcgcagggcgaagctcgtcggaggttgcgctccccgcggacggaattcggcgcgcgcgatttggctcagcccgcagaagagaacgcaagatagaaaatgaaaattggaggatgctagctgcaagacattttatcctaccctcaaaacgaaacaagaaatagggggatggacgacccaactcatgtaacgaaacggaaaacggattcacgtactccatccaatcactatcaggatggatgtgctgtgatgtgtgacactgtgacccatcccacaaaatcctaaaaccaaaacacacgctagcttatcaagcatcgatcgagaattcgagatcggttcggccgggctacaaagttttgtgatggcgcgcgtatggcggaggactagagcgcaccacaaacgcaatcttgtgatgccgttcagcctccacaagttgctagacaaggtcgacgtcggaggaaagcccaacgacggcagagggagcgccggaggagcgggtgtctctcgacgtaccttgccgtagttggcgaagttggtcctgaggatgtgctcgaccacggcggggtcgcacgtgtatatctgccgccggccggccggcaccagcagcctcctctgcgtcacctctggcgccaagatgacgccacaatcctcgatatagtagacgtcgaacgcgcgcgacataccgagtactgacgactcttggctgaactgtaaaacgaagtgcaccccaggctcatcagcaaggtagtacccctggccgttgccccaccggatgcgctactnctctacatacaatcgattcgaggacactcatancaacgtaggaacggc

SEQ ID NO: 8997 - DNA, 580 bp, Zea mays
tgcctcccaacgacttctctcctcgtcagcccaagcaaggatataggtgaggcaaggagacaatccatcgaagtcacatttgttccgatgaatccaaatagtccaagcacccaggataataagggagttaaggccttttctggtgacacctgagaccacctctgaaacctcctcccaccaattcaagaaggaggtgaccgccgactggggggctagggagtgaagcccaaatttccggaaaagctggtaccaaaagactctcgagaaggagcaagccaccagaagatgatcaagagtttcttcagcttggtcacatagcagacatttctcatggtggtttaggcctttcttagctaatcgatctgctgtccagcatctattatgggcagcaagccaaatgaaaaaacgacactttggcggggcccaggttttccaaactcttgtgaagtgtccaaaggaaactgaacccatgaacagtccattataagcagattttgcagaatacattccatctggggcaatactgaaaatatgtcttcaactctaggctgcagctcaatggctgagagcatctcccaca

SEQ ID NO: 8998 - DNA, 606 bp, Zea mays
tgacctaggcctcccaatcacacagtcctgaactgtccgaacttagactccaatcatcaacgtagtcaatgagcgctttcactggcctcctgttcatgatgccccctagatatatcttccacaaatcctgaccttccaacctctaaagtggtctgactttcaacaattcaatgggagcatcctccattatcttcagtttcacctttgagccaccgctgttcgaattcttttccctgtccgcaccaggtgcggcactgcactgcgagctcaccagccaccacctttgggtttactgtcttgtgtgactgaagtttctgtttggtttgctcaaaatgaaagccagagctttgttcatcccaattgctcccttcgtgcatcaattggcttgctgttagggtggatctgtagaacagtttatctttattggttttgatcttgctgcatatgtccgtgagtatgaagctatgcagtgtgtggaatacaactatgccatggtgtataagctcagtgggagccagagaggctgttggtggccggtgagaggtttcagccacaggaatcggtcataggcggtcaagctcctctgggaactttggggtctgggca

SEQ ID NO: 8999 - DNA, 653 bp, Zea mays
cctgcggccgactctagaggtatccccctgacgatatatacagcaggctagcttcggagttcggggcactcagcgatggccattgccggcgctcttctcctcctgctcggactcctcgcgcgggaggccgctgccggcgggtggcagagcgcgcacgccacgttctacggcggcggggacgcgtccggcacaatgggtaagcccctgactcgattgccctgctacctctgtcgtactagtactactacgtttccatcggctcagcatcacacatgaagaaactgatccttcttctttcttctttcttcttcttctctgcgcgtgcacggacgacaggcggcgcctgcgggtacggcaacctgtacagcacggggtacggcacgagcacggcggcgctgagcacggcgctgttcaacgacggcgcggcgtgcgggtcctgctacgagctgcggtgcgacaacgacgggcggtggtgcctgccgggcaccatcaccgtcacggccaccaacttctgcccgcccaactacggcctccccagcgacgacggcggctggtgcaacccgccgcgcccgcacttcgacatggccgagccggccttcctccgcatcgcgcagtaccgcgccggcatcgtgcccgtcgcgttcaggaggtac

SEQ ID NO: 9000 - DNA, 624 bp, Zea mays
tggaagaaactggagccgccgatggtgatccgcatccctccctgccgccagcacgtcaccctgcagcagcagcagcacgcatgtcgttcgactgaagtgtcgttcctcggagacgcaaacgtacgtacgctagcttagctgcatatctgcatgcataatgcacacttgacttactgctggtagcggacggggatgatgccggcgccgtagacgccgatgcgctcccacgcgggctgcgccatgtcgaagtgcggccgcggcgggttgcaccagccgccgctgttgctgggctgcgcccagttgggcgggcagaagttggtggccgtcacggtcaccgcggcgcccggcctgcacgagggcgacgcgttgccgtcgcacatgaccaggtagcactgcccgcacgccgcgccgtcgttgaacagcaccgagctcagcgccgccgtgttcgtcccgtacccggcctggtacaggttgccgtacccgcacgcgccgcctgcatgcatcgagcacgagacgacgacgacgacatcaaaccacatgcgcatcgtatatgcatgcatctcgtgcaccccccggccccgcggcgcgcatgcagggggatctcaagagctccctaaagggtct

SEQ ID NO: 9001 - DNA, 568 bp, Zea mays
ttgttcttcctccagagaacaaggactcgtcccgtacgtacgtgtgagtgcgatgactcctcccgtgtcagagccaactaatccacccgaattgaaggatcccgttgtcgtcgacgtgagtgtgactgcttctaagagcaacgatgatgcccaagatgatgtgtcgttagtagggttgggtggcactggcagcagcacatccgccactgacaagaataggttgctgcaagtagcagacccaccagcacccatgaaaacctctggcggtgtcgatgtgagcatgtctcgcatgaatgatgaccagggcgatgtgctaggattgaatgccttcatggcaaagaagaggctgctttcaacacatgctgcctctttggccgcagatgccgatgctgaagaagaggcaaaggccgccgcgaggaagaagacacggcttggttggggtcagggccttgcaaagtatgagaatcggtacaataagaaggattatgagaacacacataaatttttagctcatgatggagccactcgtgaagctgcttcttctcacggatcatgtacgccgccacca

SEQ ID NO: 9002 - DNA, 1031 bp, Zea mays
tgcgcgcgtcaggataaaggtgtcaggccaccttgcaattaaatgcccctgcgatttggtcggttggcatggcgatttggccaaggatgcttcttggtgaagactgggccttgggcgaaccaaaggtgtgtcagttgctgcaggggggcctcgggcgagacgtagatcctccggggtcggctacccttgccctaggctgggttcgggcgaggcgtgatcgcgcccctcgaatggaccgatctttgacttagtcgcacccatcaggcctttgcagctatgtgatgatgggggttaccagctgagatttaggagtcttgagggtacccctaattatggtccccgacagtagcccccgagcctcgaagggagtgttaatactcgcttggaggcttttgtcgcacttttttgcaaggggaccagcctttctcggttgtgttttgttccagggggtgcgcgcgagcgcacccgccgggtgtagcccccgaggcctcggaggagtggtttgactcctttgaggtcttaatgcatttcgcaatgcttcggccggtctggttgttccctcatgcgagttggccgtagcccgggtgcacggtcgggtcccaagttctcgggctggtatgttgacgctgtcaacggtttggccggagtcgagtttgctagagcagcccccgagcctccgcactgggcgagaggacggtcagggacagactcgacttttttacatacgcccctgcgtcgcctttccgcaaggaggaggggggaaagcgccatgttgcccttggagggcgccgaacatggtgtctccagtgagctgctgacgggttatccgagtggacgcccgtgccccatttgttaggggtcggctagaggcccggaggcgcgctccaaaagtacctgcgggtgatctgccggacccggtccccttttgacggggtccgagggctcgatacctccctctgatgggattccgttacaagatcgttcccgctggtctcggaaatgtcctagggtacctcgggagcgtagcccga

SEQ ID NO: 9003 - DNA, 1672 bp, Zea mays
ctagagctcgacgacgacgacttctgccccggggggccgaacagcacagcgagacctcaggtttgctgtttgtcataaggccctcgcccatgccctcagtcgagaggcaaggacggttagaaggccgtagaagttggaggtcagtccatgggcggcgctggctatctcgtcggcggagaaacctctttcggctgccgtggcgcaaggcggcgccggaagcggctccgaagccactcgggtcggagagccgggcacgcggcagctgccagcgccacgaacggcgaacgcccttccccccgatcactgagggaaggagcgggccgctgcccgcgcggagacaggccccaactcggcgcactcccctccccagcactgatgatgaacatccttgaagctgagggaggggtagaggccgcagcccggcttgcttctccccaccctggaactggtggtcaccgtcttgggtgaccgacggcgaggggatgcggccgtgctgcctgatgaaaatccttgaagccgaacgatggctgaaaggtaccaacttctgcgaagttgcgttcctccaacgacgacaaggcggaagaaccgtgggcgctccccatccgagggctcggaaggtggaaagacgcgatgcatgaggggagcgcgaagacatggttgcctttcatgggggtcaccctccttttaaaggcaactctccccacttgcgtcctcagccgtcacgggctgagtcttctccaacacgctccaaggtcctccccctacgacacaggggctgggtcccacgcgtcatgcaagctggcccagggcagaagaagccaaaccaccacgcgcggtgcgcgtaactgcccagcggttaggagcattcctccactttcgcccagaccagcgggcgaaagggcgggcagtcatgcaggcggtatgcaaccgcgccaagtgggcgcgcccctccgacttccaacgcacccagcatggaggcctgggcccacgcgtcatgcaaccggcgcgccggttgcaacgtgcgagcaactgcaccgccacttgcgccaccaccgcgcctcctcgactgcggaaccaataccgcgactcgaggcgacccagcgcacgacccagcagcgccagcctgtcacgacggtcaatgcggccaaaaatgggccggcagtaatggcggtggcaggcgggcaggagcagcggtcacgtcgtcagccaagctcacgtcccatccgggggcagcgagagaaccctctctcacggcgtgaagacaacgcgcccgtgttccattcctcgaacggctcgcgcacgcgcaacggccgccccgcgaaccactcgccccgtcgcattaactccgcggcgggacaggcggcgcctctggcaggagaggcgagcgacgcttcgccttcgccataatgaccgcgtcaaaaaaggtacgccgcgtcgttcgatttcgtatccttttccttttttcctctttctctctcttgcaacagggaccgggaaagggggataccccgaaaaggatccttctccgtgaaggaaccaggctccgagcctccctactgatcagaagttcgaaggctggcccctcagaagggttcaacagccgcctcagagcactcgggctccgcgcccaccactggttagaggttcgaaggctggccccttggatgggttc

SEQ ID NO: 9004 - DNA, 597 bp, Zea mays
tgaattcgtgaagttcgtatctttttgctcacatgtgcagatttcagattttggtcttgcagtgaccagtgggaatattgacaagggaagcatgaagctttctgggaatttaggttacgtggctccagagtacctattagatggtatttgtgtcagcttaactgtcaacttcgactcacatgcataaacaacttaattattgacagtgcagggataataaggtcataagaacatgggtaacttttagccattgcgtcgatttcagggaagctgactgaaaaaagcgatgtatacgcatttggagtggtgcttcttgagctactaatgggaaggaagcctgtcgagaagatgagtcaaactcagtgccaatcaattgtgacatgggtacggtacaaaaaaaatacactaaacctagaatatctctaattgccacaatttggaactttagtgatgaacaattgtcaactcccattcacaatttggaattttattttatcatatactggaatacatcggcttcatcatcagtgctaacaattaaggagtcaatgcaatttctttgtgtgctgaaaaaatcataaacaggccatgcccgca

SEQ ID NO: 9005 - DNA, 601 bp, Zea mays
tgcaggctccgacgagacatcatttgtgatctacggtgatatggggaaggctccgctggacccatcagtggaacactacattcaggtagaccaaaatgttgcctcgagcaacagaatcacttaactctgggtttttattcagattgtaactttccttctgaggtgctctgattgtattaattccaaaattgtgaatttatttaagtagtaactctcacggaatgcatctgcagcctggatcgatttctgtggtcaaggcagtggctaaagaaatccaaacaggaaaggtcaattcagtcttccacataggagacataagctatgccacaggctttctggttgaatgggatttcttcctaaacctcatagcaccactcgcttctcgagttccctacatgaccgctattggtaaccatgaaaggtaactgatacttttaaaatcttatgtttgcagtttaatatgaacagttgaattgcatcgtgaaatgcaccatcattaacgatgttcttggctcagggattatgcagagtctggttctgtatatgtgaccccagattcaggtggcgaatgtggagttgcatatgagtcatatttccgcat

SEQ ID NO: 9006 - DNA, 576 bp, Zea mays
tgaaagatacatctgaaaacgatgaactactgctgggaagcatgcatggcagcgacagggacgaacaagtacgcagctcacctcgggctccagctcatagaaggagttgacaagcacgtcgtcggcttgctccagcccctggaactggcggacgaccatctcgaagtaggccgggtacaggccggtcccgaccttgaggaacgacggcaggccatccgggtcgagcgccggcagcccagggaggcggagcaccccgtccaccggcacgcgcagccggcggcgccacacgtgcccgtacgccacgttgacggcgcacggctgcgtgaagaaggccgcggcccgggcgccgtgccgccgcgccacgccctgcgcccacggcaggaacgcgtcgtagaccaccgcccggacgggccggccccgcgcggcctcgtcctcgaggagctcgcccagcgtctccgaacccgcggcctcgagccgcgataggtaggcggccacgtcgccgcactcgccgaagccgccgcggtcgaagccgtccgagaccgccgcgaggcggacgccggcgtcgccaggcgcgca

SEQ ID NO: 9007 - DNA, 587 bp, Zea mays
agtatttgaagtttgattcattgtctatttcttttctgtgttcactgcatcgagagtttagttcgttgttttctttcttccgtgtgactctgctctcttcattcgattcacactgttgttaattatcagccagtcagtcaatctcaaactctccatgcggtttcaaaacatttgatggcaactccgctcctctgaattcgactgctacccagaaactgtaaagagatggggtgtggcccatcaatccccgacaagtacacgataggtgggaaggggcgcaagcgccggagcgtcatacaggaggttgccgtgttcgtgcccaccatccgcatcccagtggcctctgacatagctcatccgctcaggggaatagtttccaaggatcttgtcgaccgactctccacactccgtgcccatgtcgcctcgctggctgaagaaatctgtatgttcatctctgatctgtcgttactactgctcagctctgctctgctcgccgcctgagcttggttattgtaaaaggttctgatttactgttttgaaattggcgaccctatgctatgcgaagatcacgcggacgtatcaggggg

SEQ ID NO: 9008 - DNA, 637 bp, Zea mays
gatcccctgaagggcaaaggcatgcatggtccatacttgataattgctcctctttccactctctcaaattgggtgaatgagatctcgaggtaattatctcaaggcattctttcaacacccttatcatcaatggtttctaatgctgatacacttgattccaggtttgttccatctgtttctagtatcatttatcatggagataaagtggcccgagctgagataagaagaaaatttatgcctaaaactgctggtcctgattttcctataatagtgacttcatatgagattgctatgttagatgcaaggtttcttgctcactataggtggacatatgttgttgtggatgaggtgacaaaaaaaacagatgctgtatattattgctcttttatggccttttcccttctttgtattcatgtgtcagttctatgatttctacagggacatcggttgaaaaattctaagtgtaaactattgagggagatgaagcgcataccaatggctaacaagctccttttgactgggacacccctccagaacaatctggcagagctgtggtcgctattgaacttcattttgcctgatatattctcatccaatgaggaatttgaatcatggtatgattcacaggatcacttca

SEQ ID NO: 9009 - DNA, 774 bp, Zea mays
  unsure (1)..(774): unsure at all n locations
acccccttttatgcctttccccggcttcggtattggttggtgttggaatttgttgaaccgggataaccattttcccccacggggaaccggcttatgcnnnnnnnnnnnnnnnnnnnnnnnnnnnnnttgaagttagcgaggggggttggcaatcgacagaaatcaacccagggttttggtcgtgccgaggcttctacaagatgggcgcttgtccagtccagtccagcctgacgccgagccggatacacatgggctcggtccggtgaatttgatcgagtagctcaccagccacgtgccgtcacgtgcgctacctgcattgagtctgaaatccaggtcaacgtgaaatgcgcgcgccacagccacagccacaccgtcacgtccaagcagcaagcactatcaagccacctaatgtgagcagataagcgctgtcgcaagacgctatctaatctaacctgcagtttgtatttttttttccttcctcctcctgatggtcgctgtcactgtcattgtcacaggcgcggtaacgtagcgagtccgatctcgtctgtcttcgcttcgccacgaaacgagacgcatagcgccgcacgccatgtgtacccagcaatcgaccgcgcctagcggcttagcctttgcgtgctcgcgatgcacgaagctggggacagtcgttgtccgtctcggcgcggtgtagtgtagtacccatgcctacgttagcaacaccgccgcccttggtaatttaggacgagcaacagccgcgcgggctggcaggaggctcca

SEQ ID NO: 9010 - DNA, 1202 bp, Zea mays
cgtaccccgcatcaccgcttggcctagccgcttgccctcaccgcgccgcgtgccctcaccgcgcgccatcgtcgcgccgtgccacgccgagccgtctagccacctcccaacgccgcgccaactccgagcaggcgcgccctcgccacgccgcgcgctctcgccgcttgcccttgccgcgagccctcgctgcgccgagccacgccaagccgactgcccacgccgagcccactcagagcagccagacaacgccgtggccccctgcaccgttgccacggtgatggtgttacttagattatagaaatcagttagctaatttacttgatataatgtatagattgatagctatatacttgttaggataaatagatagctaagtatttatatgtaggatacttgcagcattgtgtttagcacaatgatatcacatggttagcatatagataataatgtaactactcgggcaggattatgtgttggcaaccatcgggtcgatgtaactttgcaggttatataaacatgactgtatagcggaggtgctgccgaagactttattgacaatagtaatgccagtgcataggaggtcttccgactggaccttctgcaccgttcgctggactcgtacataatctgcagtccctcaacctcgcgagcaatggcctctacggcagcatctcggtccttggtgagctcaccagcctgacttccctcaacatctcgtacaacaacttctctggcgccatcccagtgacgccgttcttcaagacattgtcgtccaactcctatattggtaatgccaacctctgtgagtcctacgacgggcactcctgtgcggcggacacggttcgcaggtctgccctgaagacggtcaagaccgtgattctcgtctgcggcgttctggggtcggtggcgctgctgcttgttgtggtttggattctgatcaacaggagcaggaagctggccagccagaaggcgatgagcttgtctggtgcttgtggtgatgatttctccaacccctggacgtttacgccgttccagaagcttaacttctgcatcgaccacatcttggcatgcctaaaggacgagaacgtgatcggcaaaggttgctcgggggtggtgtacagagctgagatgccgaacggggacatcatcgcagtgaagaagctctggaaggccggcaaggacgagccgatcgacgccttgca

SEQ ID NO: 9011 - DNA, 563 bp, Zea mays
tggcctcgccccgtcgtctgactagtgactagctagctgatcggtagaggaacggcggcggggggcaccgggtgatgtgggcacggaaactcgcttcgtcctccaccgattggatgccgggtgtccaaagtggcgcgtgtcatgtgtcaagcacttaagctagctacaccaccagaggtctattgagcttttgttttttaaattacactgagaattttaaggagagctgcattatattgctgtgtatctagacatctgacggaccatccagatttgtgtcgtcctcactcctcagtgacaccgacacgagtagtgacgaatctgcttttttatgtaatccgtcctgcaagcgtacgtacctgtgttttctacaatctagcgtatatccagtaacatctttgacggagtatatatatacacatggaccacatcatgcacgtagacatgtacgtacggtgcacgcaccgcactgaaaaaggatacgtctcaatcatgtacgccactataatgtgcatgtacggacggacggatggatggatgtgcttgtggtcgcttcttcgtca

SEQ ID NO: 9012 - DNA, 636 bp, Zea mays
tgccgttcgtggccggcggcgcggagaagagcgcgagcgccagcttgttgccctcctcgtccgcggtagcagcagtttctcttaggtccaccaggtcggactgactggcctcttccgccggtctgggtgtggcaggctcagcgccgatggagcgcgttgacggcgccgggagcaccttgatgctgttcatgccgtcgacatggccgtcgtcgccttgcgcgttcgcatcaggctggtgtgcgagtcgtgatggcgccggcggtgatgcccacgcgcgccccgccctgccgcgctccctcaggaactgctccatcgtctcgagcaacttgtcgtcgacgcgcttgacgtcagggaagtcggacgagcgcgcgatgccggcgtcctcgcaccaggcatagaaggcccggagcgcgtcaatctgcttggcggtgccgacgtaggtctcgaaggccttgacgcagtcggagtagtccatgtcgaagaagcggtcgaggaggagggcgagcaggagcgccacgtcctcgtagacgcggaagctgtccctgagcatcgggtggagcgcggcgcgcacgacgcggctggcaccggcggcgcccgcggggcggcacgccaggaggcggtcgagcaggtgccgca

SEQ ID NO: 9013 - DNA, 668 bp, Zea mays
tgcagcaaagagatcgagagcctcgagcgggagatcggtgaccgcgcctcggagaggtggacggacgccatgatcgcgctcgtcggtctgctacggtacgccaagtgcgtcctgttcagcgccacgccccggccttcggattccaggccggaccccgaggtcgacgaagaaggggagcccccggcgccgccgccggacttccgctgccccatcaccctcgacatcatgcgcgaccccgttgtcgtcgccagcggccagacatacgaccgggactccatctcccggtggttcgactccggcaagtcaacgtgccccaagacagggcaggtccttaccgttttggagcttgtgcccaacaaggcgctcaagaacctcatcgctaagtggtgccgggagaacggcgtcgccatggaaagcagcgcggcgagcaggagcgagccggcccaggcggtggccgcgaacaaggcggcgttggaggcggcgcgcatgacggcgtcgttcctcgtgaagaagctctccatctctttctcccctgacgcggccaaccgcgtcgtgcacgacatcaggctgctgtccaagtccggcgccgacagccgcgcgttcgtcggggaggccggagccgttccgctgctggtgcccctgctctactccgaggacgccgggctcca

SEQ ID NO: 9014 - DNA, 594 bp, Zea mays
tgcagcagctaagttaaatgagcgccatttgaaagagaagacgcgtcggatctactcgtaccacaaaatctgctactggttttccaacgccgaaattttatttcgccagccaacaagatttcctttttttttttggcaagtacacagctaagctaatggttcgttagctgcctctgctttcctttgcgtccatttattaaagttgcgttgtgcgagaaagaaaaagatccccttttgtcaatgaaaggaaaacgaaaagagaggtgggattagcatatagtacatacatggcttggtggtgggctcggccgccgcatcctcgccgtcgtccttcctggtgggcaagccgggctcgtcggagcccgccgccatgtccttcctcgtgagggcagcttccggcaagccgggctcctcggagcccgtcgcgccctcacgcagatcgacgggatccgcgctgtcgccgccgccgcctagcgtctcctgcggcgggatggtctccgtctccggcacggacggtttggacgaggtcggcggcgcgttctgctgcatcagcgcggacgtgttggccgagctagctgagaagagaggaaggca

SEQ ID NO: 9015 - DNA, 557 bp, Zea mays
tggaatatcattgaccttgggagatctgttgaaatatatctttccaccttcacatgagtttatttgacagcagcacccctcagcattagcatcattttctgaattccccgaagtaccattttcatttggttctctaacgtcacattccatggagaaacattccatatctgcagaacgtcccttttccaactcatgcccattgtcagaacctgcaaagttaaagaaaataattaacttgaacttcgtaatttgaatttatctaccaattgtattggcattattacattcagaaaatagagccccgaactctctaagttcacttccacactggactgactcgacctttacatcactggccttgctttcttctctggtcggatgagagggagaagcagaggatagagtgatcttttgccgcatgaaagtctgtcccattttacaatatcagaatatggatttgagaaaagaaagtaaagagataaaactaaataattatgactgctaaaagaaggcacaaaacatccatttcataagaaaaataagatttcattcatgca

SEQ ID NO: 9016 - DNA, 580 bp, Zea mays
tgcaaataaaggtagttttgtgcgtcttgagtgcaagttaggtcaacataggaagaaagtttcagttcacaacaaaaaaactcaaaattctagttctcaatcttttgcgacaccaacctgtacaaaaatcacgaggcttgactaaagattcactcacaattctttcaggatacttcagctaaaggttccctgtattttcagaaccatcacgccatttttttttcaaaactaaagcatttaccatgaataacgtattgtatatagtcctgttagttagttgttttttttaaaaaaaaaactaatttcaagtgtaggcgcatatgactctcatctaccttccctttccccccctaacagctcttgagctctgaagagacatggatgtacgcacctcttgcctatacccacatcagcatggacctcggtccaaatgttgctgtgaaccaaccatgaccgtctggaaagtactgtctgaactgatgagaaggatgggagctaaaagtgcccgctatgctgctgccaacgttgctccatctgctcttaaatctgccattgcagcattgaccctgacttctcattc

SEQ ID NO: 9017 - DNA, 650 bp, Zea mays
tgttcatcatgcatgtttattcagaatagctgggtttgacgaattgcatcaacttcgtgcaggtctcgacggccccatgccatggatgacgaggatgaagatcgccgtcggcgcggccaagggcctcgccttcctccacggcgcggacacgccggtgatctaccgggacttcaaggcctccaacatcctgcttgaccaggtgaagacgactctctgcctattcttttcgttgctgtctagtgctagtttcgacggcagctattgcgtagctgtagaaaaggatactgacgacatacacctgccttgtgtctgcgtctgccttaacaaaatccagaaaattccttcgctacgaacggaattcataaaaaaaagctcagtacaaaataaactttccaagagatttgaccctgaatcgtccataggagttggatgtcaaagtcgtctgccacgcgtcccaaaactgttggctggtttcgaccgaagaccagccctgccccggcgactggcgtgattggaactcggaagtttcttcgatatacccaattcctagcaatcccagctcatggagtctacgtaccaagctcaataatggatatatgtatctgccatcatttttaaaagagagagagagagagagaaaagaatctgca

SEQ ID NO: 9018 - DNA, 637 bp, Zea mays
tcggtaccctgccccgcaaccgattgtcacgatatacttctggtttggctagcgacacgaaagaacgtcacaagcgcagcgccacatgccacatcaacgacgacactgctcaaaaaggcttcagcagttttgaactatagcatatatttagatgaaacaaatctacatcactggttcgtttcgaatctccaactacctggaaacacatatatatcccactgcgcgtccatccacaccgatgcgcgggggcactactaaagaacgtcgtcgacagaaaacgtgagcgaggtaaacgtaaaagccgggtcctccgctctgaacataaaacaacgttgttcaggccggaggatacgatcacgacggctctaaaccctaaacgtcgacaacttatgacacaaagataacctccgttcttcttctgcctcagtatcctggtaagtgtggccgttcagaaccccacccccgccccctccttctggcgcagcttcttcttctatgtacagtttagctatgaggttagcgtgctatagctcgatctgaagatggcggccaccgatcgacagattcaggcagccgtcagacgtctgccgggaggttgaggtcagggagcacgaagccgctcggagcttcctgctca

SEQ ID NO: 9019 - DNA, 1339 bp, Zea mays
tgcatcctggagagcagttggccagtaaaagccataccggaaggccttaccaaccagtgtgcgggatgctaaatgacttccgcactctcctccatggatctccgcgagtagctcacgaccctcctcctgggtaatgcaccacatgtgaatgccgttggcgccatggcggtataggtccccttctaccaccatgtagtgtttagccaaccgcactatgcgctctatggacacatgatcttcaggaaggatattttctttcaggtagtcccggatctcggagatccatgcatcgggaccactctgagatattggttgcggcgctaagaggttggcaggaccctctgtagcacacacagtccttggtgggtcctgtagatggaacaccaccgggaccgctagcttcgaggtgctagtctcgcccccttcgcccatttcggcaggctaggcagtgggtctcaacagccgtattttgaagatgccctcgggcacaggtgcccaagttgatgccctcgtggagagttcatctgccgctgagttgttagcccgaggaacatgttgcagttccagggcaatgaagtccttttccagcttccttacgtggaggaggtaagctgcgagcctgggctcgttgcagctacattccccgcggacctgcttgatgatcagtaataaaaagagaacattttatccgatcttcgaatttaaacttgtcagaaattttatcttttttattatagctaaagtataataaatttgaacttgaaatattatatataattgaaataaaataaaaataatatgtatgaattttcttttataattttatgtaaactttattagcttatatatgcattatatgtgcatatagatggccaaacgggcggcccagcacgacacgacactggcactggcacggccaggcacggcacggttagggcacggcccgtttagcacgattattaaccgtgtcgtgtcggcccggcactagtgcctgaacccaggcccaggcacagcactaagggtccttagccgtgccgtgccggcacggcaggcacgacgagcccatagtgccagggccggcccgggcactacaccagaaaacacacaaaccacatataattcacaaacacatagttaaacatactaaaatacctaatactgagttgtttagtgcaatgactgccttattaaaaacctatctaggtaaaaactcacccttgtgagaaaaccctagataggaaaaaagagtacagcccacagctcatttattgttcttacatatcacagagagagtcattgtttacagtgtacagttatagttacaggcaggggtaccgag

SEQ ID NO: 9020 - DNA, 618 bp, Zea mays
tgcgactgggggccggaacgagcgcaacaagcgcccacaaccccagggaggcaacagtggctcatgcccaatgcaccccaacagtcgccacagcgctgtggagtgtcgcgagatcatcaagctcacgaagcgcgtcagcgagcggcgcgagcagacttccaaggatggctccccacctcgtcgccggcctgtcaaggagagggtcgacgatggtgatgtggccgcgggagaacgggacctcgggtatcaatcacccgagcaggtcctcaaggacatcctcactggagactccgactccggtgacgacaacgactgccgcaagaagctatacgtaatgtacgacgggagttgggagctcacctcccgtagccgtaggaacgtgaagtccctgcgccgagaggtcctttcagcggtctcgggggtccctaaggctgctccacatcagcagtggaggagcaccactatctccttcggggcatccgactgccccaagaacatggcagggaccggcatactaccactcatcaccgcccctgtcattgccaacatgcggctgcatcatgtcctgatcgacggaggggctgggctcaacgtcatcagtcatgctgcattcaagca

SEQ ID NO: 9021 - DNA, 641 bp, Zea mays
tgcatacctgtgtgaattcaatccacgctactacaggcttgaatcttgtgccaaggtttgcagctactttgcttaagcacaggtagtttgtctttacctgcaatggcgtgctggagagatgagacaaatagttcgcaaagtgcggttttatggcactgtcagatgccgtagaaccatactttattacttattcatatcaatccaaataaagatgcatttagtggtcttaactgcatcgtagacagcattagccctgttttcagagtttgtgaaagttcccaggtacttgatccactcagccatctggagagaaccatttaatagatagtatatagttttaggctgtacataactagacaagttccagactgaactcaggttccttttattgttttacctgcaatggtgtgccctcttctaagggtacatatgctgcaaagttgcaacctctgtcttcatctgtatcgcttatgaaatgcgcagtaaactgcgagagtgtctgcacatcagttctattcacaagctgggcatttccacttgtatatgactggagcacgcactgagaagcgacttggttcgatgttattcctttcaagctctctagcactccaagcagggggatcctctagagtcgttccgca

SEQ ID NO: 9022 - DNA, 630 bp, Zea mays
ctggccgtgaccacgttgtcatcttcccgttcatggcgaaaggtcacacgcttccgctgctccacttcgccacggccctctcggtgcaccataaaagcctgagcgtcaccctactcacgaccccggcaaaccgcgcgttcgccgccagccgccttccctcctcggtgcgcctcgtcgagctccccttcccgtcgctgccgccactgccagccggcgtcgagtccaccgacgccctcccgtccatgtccctcttcccgacgttcctgcgtgctacggcgctcctacgggagcccttcgcccagttcctgacgtcgctgccgtccccgccgctcgcgctcgtctccgacttcttcctcggtttcacgcaccgcgtcgcgacggccaccggcgtccgccgcgtcgtgttccacggtatgtcctgcttctccatggccatctgcaaggcactcgtcacccgcccaccggcggtggccagcgtcgacctcggcgctccgttccacgtgcacggcatgccggaacacgtggcgatcacggcggatgaggtccccgacgtggtggtgaagttcgcggacatgaaggaccccgtgacccgcttcttcatcgacgaagtgggcttctcggacgtgctca

SEQ ID NO: 9023 - DNA, 904 bp, Zea mays
  unsure (1)..(904): unsure at all n locations
atccaattaggaaagaatgtaacaacaaatttgtaaaggtaaagtgaactggttgtgcaatgaacaaacatgatatacactaccacatatctacataccacacagacatgttaaatcccatgaccatgcaaacagctatagacagtgcataaccacatatggtgtcaccatcagaaataatgaacaggttttccttctcttattcagaaaaatactatggaattgcatgccaattgtcatgcgtaaaaccaccagagtaccacaaaatctagaactgacaaaacagagcacgagagagatctggccagcatgccaccgcactaattccatacaagatgcttctgacaatatatgtaagtaggataccaggccaacgcgtgtacataaagagcactggtcaggcagcaacaagcggcctattcaggataccaacactctaaacacagcaatcgtaactgttatcagcagaacctagcattgtaaccaatggtgacaggcaggaagcattgcaacaagctcttagnnnnnnnnnnnnnnnnnnnnnnnnnnnnnnnnnnnnnnnnnnnnnnnnnnnnnnnnnnatttgttaatcccgcttcacaaattttccacacaaccattaccgaggccgggaagccttaaaaagtggtaaaaggccctggggggttgccctaaaatggaagtggaacttaaaccttcacaatttaaatatggcgtttgccgctctcaatgggcccggctttttcaaatcggggaaaaccctggtccgtgcccaacctggcatttaaaggaaatcgggccaaccgcccccgggaagaaggcggttttgcctaatgggggccgttttttccctttctttgttaaattggattgctgggctttgggcctttcggttgggggaaac

SEQ ID NO: 9024 - DNA, 589 bp, Zea mays
tgaaggggatgagcctccaacgtcagccagactcggcaacgtggtacccgatgctcctcgtacaactgcaccgtgtacaaagggggcgtagggtaaccggcagagttaagcacttcccacaagatggaaggaaagccatcatgagaaaggaagtcagagctgaaacgagtgtctcctccactggctggggtgggtgagttcatctgcggaaggggatcagatgtaaagattatggtggaaggaagaaaataaaagagcctgaatggtttaaaaggaagtgggttagctcaaacttttacttctttaattcttaatccttcaaattttataatgcatgcatgctgaaaataacgtctcctctccgaaataaaagggtgctcctagggcatccttttaaaaatctacatactggcccacagggcctacttacttagccacctatttctccctctattcctaaggcctttcgtcctaggtctagcggtctagtcctaacgattctcatcagtttctaagcaagttttaaaatttgaaaattggtattcatggtttattgtccttctctatggtggtatttgctctgatacca

SEQ ID NO: 9025 - DNA, 553 bp, Zea mays
tggtaaatcagatgatggatcacagctaggaatcgggaaaccactgattgtctggcctacggtggaggatgttcggtgctcgatagaggtagaagaagcttaagctcaaatgcattcttctttatttgtgcacgtacgaaactataatgaacagaaggccccatgctgtctgtgcgttcttgacccttgacatgtatacaacttttttaaaactagtaggttgtattttaagatggatatgtactggcatcatgattcatgaacattttacgttcagacattaatgtttcactccaatcaatgcttgctagatacacggtattaatttttactaatcatatttacctgtatatcatctactccctccgtcccaaaatataattcgttttagactaatcacatattctttaagtaacatatgaatgtagtttccatgtatgtctagattcattatcatttgaatgaaagtggacggaaaaaaataggcagaacggaaggagtatcttattttccaactattatctctgtttcatattcatattagggttatgca

SEQ ID NO: 9026 - DNA, 572 bp, Zea mays
caaataacaactactggatttggcacaggtgtggaatcatcaccttccctcgttacacataacatcaagtcggaaagcttgtggtggctctgactttatcaccatggttttttttttatcgctgtttgtttcactgctgtatattctagcttatcaattatttgtattacaactaattgacagaatttccccctcttgtgcagcatatggcacataaccatttatacttcttcattcttcttcctgtgctcaatgcgtgtcagcacaaggaacagcagtccagagtcaaactatgagctaacgaggcaagactctttgccgagatccgagccaagggaaacctaggtaaggaacgggagtggtcggaatgaagtattgtctctacttcctgctcctggtagctagttggaagtttatgtttgatggttccatgcaggaactggctgagttgggctatatatgtgcaggtttgtttgtgtaggtacatgattatctgttgcagtcaggagcgtaataacatatgaccaatcacacaagagggatttgggaaccacgtgtggtcagtctccgca

SEQ ID NO: 9027 - DNA, 597 bp, Zea mays
tgctcttgggccgcggcgcctcgtggttgtggtcgaaggtgtaggtgacgagcagcacggcagggtcggcgcggctgcgctccacctgcttcctcgcggggcaccccttggagctgctgcagcggtagtacccactgcacagcacacaaacaggagcgcaaggttaccacttaccaccaggctgcttgctagtaattacgcactagcagaagcaggtgctgattaggattaggttcagaccgtgggtagggggagcccttgatgggcttctgcccatacttgcgccacgcccacgagtcagacggcggcggcccctccccgcactcggccagcggcaccgacacaacccgcttctccaccgatctccggctgctcgcaaacagaaaaaggacgacccaaattaatcacccactatctttgcagctcatgtctagtttgtctagactcccttgccagccaccgccgcagcagatgaaccccgcccgtacctgcgcttagctgccggcgacgaggcgtggaggtcgcgcttgttcggcccggctccggcgcgaggcgactccgcgtccgcgtccgcgtccgccaccgcaaggggggcct

SEQ ID NO: 9028 - DNA, 672 bp, Zea mays
tgccgcccaagatccccaccgtggcgccggcgtggccggagttcgggggcgggcaccagcagcagcgcagcccctccgtgggcacgttcctcgccgccgcgcccatgcagccgtcgtgggtggacgagttcctcgacttctccgccgccaagcgcggcgcgcaccgccgctccgtcagcgactccgtggccttcctcgagcccgagcccgagcccgagcccggccccggcgacggcaatgccggggcgcatgacttcgaccgcctcgacgacgatcagctcctgtccatgttctccgacgacctccaaccgccgccgccgcagccgcagacgcaggccgcgcccgcgccggtggcgagctcgtcgtcgccgtccgaccacaacagcatcaacgacgagaagacggataggggcgacgccgaggaggcacagagcaagtgccacggcgccgccgccaccgccaccgcggtggatcctaagcgcgtcaagaggtgacgatcttccgtcgctcaaattccggcaatgcgcgcccttcgcgacgcagaattctcatcccggcaacaaccccttccgtcgctcgcaggatcctggcgaaccggcagtccgcgcagcggtcgcgcgtgcgcaagctgcagtacatctcggagctggagcgcagcgtcacgtcgctcca

SEQ ID NO: 9029 - DNA, 1078 bp, Zea mays
tgaaatttttgaaagaactagtcgtcccagctagagaaatgatggagccatacacgaatcacgcatatggcaatgatttatctactgcagtcaataatgggcggcggccatttgccaaatagctagcgccattgtttgctagcttgtcgctgtatgtgtttgtagcagtagggagctgagcgcatcgtcttagactgttagacatgcagcgtgcaactcaactctccctacaaaactttgacgtacgagacatatgccatctttcagagacagccgtatttgtgtatttcctggaagacagcattctgtccatgatcaccatacatatatatcagcatcgcgttcaggatgcagagaagaagaatcttacgggcccaatgcaaatgtcccgagaaattcttaaaaggaaggacatggtacgcccgtaaatagtaggacgttgtatagccgggcagcgagcactcatcactcatcagggcatgggcactgttcttagggctactatatcaggtgtgacgggtgactccccgcgcgcgcctgcagggtttggattgcatcccacgcgcgcggcaccgccttgcacgcggcaaatattggagcggaaaggcggctaccaatgacgctagcatgcacaagtagtagtgcaggtgcctctgaccgtggtcggctctcacgacgactccaccgaccggtcaggcgctgtcgcgctccgccgcctgcagcgacgcaacgcaatgctgcgggcgcacaggcaggtgcaggtgcagcgaagcaacgccccgtccgtcagtccatgctgctgcatgtgttgtcgcgctacccgctgtctgtttgcggtttctgtacgtgccccccccagcccacggttcccgtaccgtacgtaccatcatctcggcgtgctttgctctgctcgctgctctctctgcaattaccgtcctgcatgcgcggcctgcgtgcttctcctcttcctttgcatgcaccctgcatgtgtatgccgcgcccgccagtgctggtgtggtggcgacctcgcttccgtgctgcctgtttgctttcatgaagtgctaccctcacactcact

SEQ ID NO: 9030 - DNA, 572 bp, Zea mays
tggaggatatcataaaacaaaggggcagtcggccagtcactggctcactgctcttaaatttctttattacaaacagtcactatcatcaagtacgtcttaaaatttgcggtagcttcctcggtctctccatcagaagaacaaactagtatcatgaactagccggctgcatcctgtatgttaaaccactggatcattaagcagtcttgggaaggatccggattgctccaaagtattattttttttcaaccgattcagccatgccataaccgaaagccatgtttgcaggagctgggcttggaggcaacaggtgtggtgtcgaacacaaggaagcttgacaacaatgctgaaatgagcagcgtcgatacggctggagtggaggacctgatggacgctgtcgaggaagttaaaccttgctggaccaaaccaagtccaagtaagtaactccactttttagaactttacaaattcgtcagatctgaacctttacctgaacgatgtactgcagaaaatcagccgtctaatggttttgttacattctccttgactatgggccctgagtatcacatctctca

SEQ ID NO: 9031 - DNA, 581 bp, Zea mays
tgccatcaattgatttgggccagccagcgcatcaaatatctacacattttccctcgcaaaaaaaacgttaataggtgttaaacgggggtgcaaaggccccccaaattgtcaggtatcaaatgtgcatataaacatgctacgtgcacatcattttctttctcgattccatatggccaatacgtgcacgctactaagaattttccttctttggcaaggaagaaaatactaatcaattcatgattgaacatcgtgtggagctggactggaggtgtcattgttgccatcctgaaccgtgttgccatcctttcggtatgcggcagcacaaaaatctaaagagaccacgccttgaccatgtcctcaattccgtccatcttctcctctgtcttccccttttccttctaacgacaccaggagagaaatttcctcctgtgcgcgtgaaacaattttcctcctcgccacgagatcatctccaactcaatggaagacctaaaagttacggcttcatagtcccatcccaccacgaggggcacggtggtcggtgggttgagggttctcagggggatcctctagagtccaccgca

SEQ ID NO: 9032 - DNA, 605 bp, Zea mays
tgcagcaagctgttctacctgtcccttgactccaacagcttccgaggcgtgctcccgccttccatcgtcaacctctccagcacgatgcagaagcttcatctatcacacaacggattccacggagcgattccttgggatatccggaagctttcgagcctcaccatactcactctcaggggtaacttgctgacgggcagcatcccgccatcgatcggggagcttcacagcctaggagttctagacttgtccgagaacaacatctccgggggaatccctcctgcgctagggaacctgacaaacctctccatactttacctgttcaagaacagcctgcagggacccatccccacgagcctggggaagctgcagaacatcggtagcctggtcctgtcgctcaaccagcttactggctcgataccagcggaggtcgtcagcctctcctctctgaccagctaccttggtctctcgtacaactccctcactggtcagatcccatcaggggtcgggaaactgacgaacctagtgctgctcgacctgtcagcgaaccagctatccggcgacgttcctgcagctctaggcaagtgcgtggagctagcccagcttca

SEQ ID NO: 9033 - DNA, 717 bp, Zea mays
tgtgtccggaacatgacgcacgcaacgacgtctagatagcccgcggccgtgcagagaaagagaaaagaacgagcgcgagactcgctgctttgttatataaatcatcacatacaacttctcctcaggatatgtcacgactcacgacgacggaaacagtagtgctgccagtagagagctctcagaactcgggaaaaaaatgtcggaggccgccgtgcgagtgatcggcctatggccgagcccgttcgtgatccgcgtcctgatcgcgctgaagctgaagggtgtcgagttcgagttcgtggaggaggtggtgggcaggaagagcgagctgctgctcgcgtcgaacccggtgcacaagaagatccccgtcctgctccaccacggcaagcccatctccgagtccctaatcatcgtccagtacatcgacgaggtctggtcctccggcgcgccggcggccatcctccccgccgacccttacgcccgcgccgtccagcggttctgggcgcagtacgtcgacgacaaggtagctagctagtcgactcgaaccgaccgatgagctcttcctctgagcacgcaattctgatcggttctccgcataaatttagcaatgatgcatggtttcccggctggctggttgacgtgtgcgtatacgcagatacacccggcgatccgcgtactgaagggaacgtacgacggggacaaggagcaggcggcggggca

SEQ ID NO: 9034 - DNA, 660 bp, Zea mays
ctcggagagtatagcatgtaccggagagggagcccaccttccactgatcaattacagatgttataataactatcacatgatagctatgtgtcgaatgttatgcacaagtttgattacactaggccttacatttcaccttaactgttcggtcacactatgtattcaaaagttttaaggttgagagcaaatactgtcagtgaacaagcatggccaacaaactaacaacgcaattagagcaagatacgcgaacacagcaacattggtctcattttgttgaccgcaggcaacgacacacggaaaaaaaagatctaaggcgcaccaacctgttgctgggcgtgctctgggcgctgccgccgtcgatgcgccggaggagaaagttgcggtaggcgacatagccgttgtcattgcaccgccactcctgcacccaggaacgcctcccacgaacaccaatgagtcggattcatccattccccaaagctaaatgcaatatgaacgagggggatctaagaagcggggggtacgcttacataccattcggtgctgaagggcggaggggggcttgcggcggagaaggaggcggcggagggtagcgtaatcggcgtcggggcgggacgaggaggaggtcggtggctgcaggacgcaggggtaccgagctcgaat

SEQ ID NO: 9035 - DNA, 616 bp, Zea mays
ctgagggtgaactgcgggccaccgccacctagagatgaatccacaccaagagcaccaaggggtggtggtggcggcggcggcggcggctttgtcgattcagctaacaaggtctacgtggggaaccttgcgtggggcgttgacaactcgactctggagaacctgttcagtgagcaagggcaagtgcttgatgctaaggtcatctacgacagggatagcggcaggtcaagggggtttggtttcgtcacctatggctccgcccaagaggtcaacaatgccatatcaaacctcgatggcatcgtaagtcctatgctattttgatcctttagcgcattgttgtacatagaggatgtgctaatctgaatgttttatcgtaatgcaggacttggatggtagacagatccgagtcacggctgcggagtcaaagccgagacgtcaattttgagattattttcttatgggggtttagaggctgatagtgtgtttcaaaacttttagtttgtagtgtctattctttcctccatatgagtaccaagaagatgataatgagagactggctgtgaaatggctgtatacaggaagacttttccccgctggaaagatgcatttatttgtttca

SEQ ID NO: 9036 - DNA, 568 bp, Zea mays
tggtggagtagaacgacgtcgagagctggccatagcaggccgtggaagagagaagcagcagaagtgcaaggaatatgcaatggccggtcgtggacgaagccatcgcgtggcctgatcagctcccacgacgacgacgattgttgcacgagtactttagcacaagatcgtcgattgagctgtccctgttagctggttagacttgctattgctagctagggtttcctttgcgactggcgggacgacgtcgtggctcgagctgtgagatagagcgtctcacgtcctatttatagtgagtgccctctcgaattaatcttgcgtgtgcatgtagatgggggtatatagcttggtcttcgctcctccccatgcatgtggtatacctagggaagcttatgatgacgagtgttgtcgttgctgatctgtgtacgtttgggttgtaatataacgtgcacagcaaccatcaacagccgacatctgtaatgaaaggctaataattcttcccccagcttcacatagaacacgtatgcacgtcgttgccaacagaagagagggggtaggtttaccgtgccca

SEQ ID NO: 9037 - DNA, 614 bp, Zea mays
tgctaaattagctaaagacgtctaaacactctagctaataattcagctattagctacttttagcaaattagctaatatttagctagctaatttcaatagcaattttttagccaactacctattagctcttgtgcattcaaacaccccctaaatatgctaccaaagctgtaaacagcaaccagagcaaacatactaaactgtatgcacaacgcttcttacaaaaaggaatgatcttgtacaggctgaagcttttgtaaaacctaggaaaacttgggaataaaaggttttccgtccattttatgggatttctcacatttcaaaaccaagcacagcaatccacgtttcacaacaagcacaccaatcctcaaaccctagtgactacacggcaaaagcgcccagactactcgacgctccaagcccaagcttccttatgccccagaaatcgtaaggcgggccaccttaatgacaaaataagagtaacacccctgataggagagcagaagtagcagaacgacctcggcgacgcgggcgcagatggcgtcggcgattcccccggcggcgagcgtggcgtgctggcccgcgatgatggtgagctcggtgatgaccggcttgca

SEQ ID NO: 9038 - DNA, 620 bp, Zea mays
ctcaatccctccgcaagaattaatcatatcagttcattttgcatttggctgaagacacacttactgaactacatggagcaacaacttttggtataaagggggcagagaaagcaacggagtaaagagtactacgagtagggagggaccggccgcattaccatggcctcgaggtggccgtcgaagctctcaagctgcgcgcggacgaaggagagcgcctcagaggcggcgatgaacgcggcgtagttttccaccgccacctcctgcatctgccgccgcacccgctccgcgtcgaccctcaaaagctccggctcctacaatcgttcagcaagccaacaaattcggaattaccatcgccgccaataaagggtcgcgcagcaaatgttggcgtatgaaccttgtggaggcgctcgatggagaaggaaagaagctcagaaacgtagggctggtaggcggcaccggcgagcgggagccccatgttggaggcggcatcttgggaggagctcaaatccggcgtgtggcggtgcctcgcgtcgaggaggtccatggcgagcggtgcgagatctggagtcgtgactcagtggtgatgaggaactggagaagaagggtgggtggttttaaca

SEQ ID NO: 9039 - DNA, 581 bp, Zea mays
caccccatcctcgtcttctccaattccaaagtaagaaagccacacgcgaggccgaccgaggaagtccaatctcatggcgctctcctgcatgaggtgccccgcgggcgccggcgccgcctccgcccgacgcgccgcagcgcagccgttggccgcggaggctgcggtctccttcgccagatgccgcggcttcgggaggtccgccaccgctgcgacttccgcctggttttggcgcaaccatgccgttgcctcacagggaggtgggtctcctcttagttcgttctgcccctctaattttgttgtgtcaggaatggatgttatagctcaggccacataagttatgtacgaactgcttgcatgaacgagtaaccaggtgatgaagccaatcgacacggatgatatgccaatcttctgttttcgtgtgtggaacttgtctgcattttgtgtattcaaatttcatattcgcaagtgattaatatggtaatgtccttttatgactgaattggggctaattccttttgaatctatgcactgtcgagctccactgcatcactctgatagcatgcatcatttctcttgttaca

SEQ ID NO: 9040 - DNA, 569 bp, Zea mays
tgcagaggcgagcaaagtctcaggattctgttcggagacgaggaggaaattaaaggctgcccgttgcccaccttgaggaagttgtaggtggcgcaggtctcctcgttcgagctgatcttgatctcgtccaccagcctctttgggtcatgcctgacattcgagaaaattttggagattaccgtgcacacactcatgaactcctaacccccccccccccccccaaaaaaaagtgcagcgtgaacggaagtgatctgactcaccagtgttccatggtagatgtgcctccggttgcgaaagtgtgagaagaattcaccacatcaaacaagtaagtcgagatgtcctgcaccaaattgtgaaggaacaatgcatttcatgtcagttctatcgttaacatagttcatgtcaggagtgcttggtaaagtcgaaacagctttccgtttaccttgtagagacgatcgccaacgacctcgtatctcttctgcgcaccaacgaggacggggagatgcgtgttcacatgcaagcccgagatgtcgtctttctgaaagatgcatggaggtctacatcgctca

SEQ ID NO: 9041 - DNA, 640 bp, Zea mays
ttgaacttgcactgcccgtacccctgcgcgtttggcctgccctcccatccatcacctgctttgggcggggtcgggacgtcgggtgaccaccaccaccaccagttcgacgagtgacggtcagttcggcttcgacggcatcagccggcttttcttttccggcaccgcgcacagtgctgcgcggcatcttccggtcttcccgctgtccggctgtccctgtggtagccgtagccgtaggcttcactggctggccgcagttggtgttgcattgcacgtagtggtcgggggcatcatccactgtacgcgccccgcgtgcggccttccctgtggcaccacctctccactccactccactccagattcgtgtgggggcacatgtacaatggaggtccgtcttgtcacgccaaatgaggttagtcactaattgctcccaccgccaccggaccggttcccttccccattctgcccaggatatatacacagattgggaatcttggactgggctgaaaccaccaccagacgcacgtatgaggttgaatatttaacgcattactagtacgtgtacgtctgttggacgattgctacacaggattctgtggtcggcactgctggatgctactctagatcagttgcacagttcaca

SEQ ID NO: 9042 - DNA, 632 bp, Zea mays
cttttaagaatgggagccccattctctacacaactgattgcattaacttcccggtagacaaatacaaaggatttgcctgcaaaagcaacatacaacttgaatagaagatttgcgacatcaatgacaagataacagtgatacattgccacagaaacattatgctgaattgaatacagagaacaacagtagcacacagtgctagcaaatggatacctaccctactgaacccagtatgaatgaatcagaattattcacagggccttaccgtcatgaggaggtgaaggtaatgatataatgtcgccatgattaagcttgaccggggatgaatttttcttgaactttttccagttgatgaatgtgccatttgagctgcaccagagattagttcaacaaaggtaggaaaaagaaaataaaactgatagatactgaactatccagaagaagaaaaacaaaccttgtgtccttgaggaaaacaggcacaggctcatggcggttccgctcccctaagacagtgtccttgtatatcttgcaatgcttcccgctgatctgctgggcaaaaacccgaaaccgctcctcaacagcacgccctaggtagtgctcgtcagcgctcaaaagaatgttcatccccttca

SEQ ID NO: 9043 - DNA, 619 bp, Zea mays
tgaagagatttcagcccctgagctagatatggcagcagttttgtacagaaaacgctagtgggcagcagcaacatggtgtcgatcggtcggtgggtcggttgttgtaggacatgttccatagaaaaagcatagacgagtctacaggttttggagccttggtttggtcctctgtgtattcacctttctgtacaatcttagtagcgttgtgtaccttcccctggaaggaaggatagcttcagttagcgcttcagaaagtcaagtgtgtagcatattggcttattgtttgctttgcttggacaatggagatttgggagtggagttcataaccctgctgaataaatactcttagctggctatgtgtatgttggacgacaatatgatccctaatgtagtacacgtgaccacctcaaactgaatctggctttgtttaaatgacaccctcacaattggtcacaggttcagagatcatctcacactttgtcctgcaatgcatgtttcgcttcgtctttggagtgtcctggcacgtacgatgtttccgttcatctgttgttcgatgaattgcgtgatgattgccggacgccatgtgcgtttttgaacgaaagaacgtttgggtttggca

SEQ ID NO: 9044 - DNA, 599 bp, Zea mays
tgtgagtttgggtcaaactctgggatcgggccggtgaacaagttggactgaagccacagtgtctttaagctcggcaacttcgccacgacgtcaattggccctgacagcttgccatccgacttctggttgttgagctgcagtgtctccagcgcacccaacgcctctaaccccaccggcaggaccccggtaaggttattgtacgacagccgcagcgtctgtagcgatgtcaggttggcaagaaccgccggtaaggaaccagagacagaggcattggaggccgagaaggtctgcagcatggcgcaccccgcgatggcgtcggggatactccatggattgagagggaggttgtccatgctgagcttgagcagcgaggggagaccctcgaggaagtccggcggcagggcggagaaggcgttgccgtcgagaacgagggtctcgagggaacccattcgggccagtgagggcacgtcgccctccagcacattaccttggagctgcagcgactggagggaggtgaggttggcgagggacgaggaaagggtgccggataaatgcagcttgacgaggttgatgccggtgacgcggccggcgccgtcgca

SEQ ID NO: 9045 - DNA, 680 bp, Zea mays
tggtggacctgcggccgctgaagctgaagcggtcttactcccgcggcggcgacgaggacgaagaaggtccacggcagctctcgccgctgtcgtcggcgacggcgagtggcgctggaaccgaacgccccccgcgctgcccgccggcgccgaagaagccgaggctgctgctagggtgtagcctggacgggttcaaggtgctgcgcgtgatggacctgcgttgcttcctgcgccgatgagccaagtgacatgcatgtagcttttgagtttcggctgcagcatccccgttacagtgtccagtcaactcccagagatgtgtactatgctctgctctgtcgagaccttcatctagctaatgtacaagtgtgagtgtcgatattcatagctttgcatgcacacacatatatgcatctatctatattgtgctttacaaaaagcatacaagtaatggctacaagcacatccacacacattttatggttgtccccccctccctaacccaaaaaaatgtgtgtataccttcccttctgggacgacaatctacaagctaacctcaattgaacatgtaaactgtgaagtgtcagcattccattttgccaacaagcagaagcagcaacatactacagcaggcgacacccaacatcatcgtctttttcgtgctccttattctgagcttgcctgca

SEQ ID NO: 9046 - DNA, 672 bp, Zea mays
ctgttcatcacaccagaactacttagcgccgacacctgccttcctcctcccctccaaccagcagctcaaagccaacaaagctcacatggagctccacttccaggtgcagccaccagtgttccagctcgagggctacaccagcagcagcagctactgctactactactaccagcagcaagaggcggcggcgcaggccaagccgtccaagccacggtgccggaagaagggcagcaacaaccacagcaagttcgtcggcgtccggcagcgcccgtcgggccggtgggtggcggagatcaaggacaccacgcagaagatccgcatgtggctcggcaccttcgagaccgccgaggccgcggccaaggcctacgacgaggccgcccgcctcctccgcggcagtgacgcccgcaccaacttcgcaccgcgcatctctcccgactgcccgctcgccgtccgcatccgcgggctcctccaccacaagaagatcaagaaggccaaggcctccgcggcggccgccgccgccaagcagcaggcgtcgtcgagctcctgcccccagtcccaccacaagcaacagcaacagcaatagtcatagcacgaatagtgctcgtggtggtggctctagcaccaccaccaccagcagcagcagctccagctccagctccagcagcgcagtca

SEQ ID NO: 9047 - DNA, 526 bp, Zea mays
tgggggtgacgactaggtgcgtcacgctgcgcggttcacgaagcactctaccaattaacaaaaaggaagggattgattaaacaaacgagcagtggctaaacggctcgacggaaagaaacaccagcaagcagctactccgtatgggtttgcagcggctagacaagtcaaatgtgtcttgcccaatgcgaatgcaaaaagaatctgcgaaattcatgcgcatctgtttcacccgtaatccgttcattatcttggaactggaaaactggaccgacagagagcaaaggaatggccaaaaccacctaaaatcttcggctgagcagtgctcctccatacgtagcagaaccatttcgatttcggttttgtgagtgaaagtgtgaaacaaacaaacaaacaaaaagcctgcaacgaatcatgaatggaaagaaagaaagaaagaatgcatttcttgtagggcaatactacgacggatggactcaccaagtagcctctgaaggccttctggatgacggcggcggcctccacctcg

SEQ ID NO: 9048 - DNA, 1226 bp, Zea mays
taaccctttgcacacctctaagaaacattcgcccaacggcggcgcgacagggagggaagacgccgaggacacggctcgcgcggtttctcgacgggtctcctgcgccgcgccccacacccacctcggccccaccggcggcggcacaggctccggtggaacaccgaactgcaggtgcggccgggtgtgtctcatgtttgggcgcgtgggagcaggcgagcagcccccggcaactgcaatggcaggtcgtcgaaacgaaaccccggctccacccaccaccgcgtccaccggcaggcacggccgatacgcgcgtgggcgcagtccgcgcggccgcggcgcagggcgcaaatggtaacaaagatagcaggccaccagcgttgggactccaacccaccgatcccaaagcccacgcccacgcccacgcacgccttgtcgcagccaaagccacaaccaaacgtccaaacgtggccggccgttgcgaccaggcgaggcctggaccagagcggtgaaattagttgtcgtatcaagaactgacacaagcagatcatagcaaaaccaggcgtgcttccaaaggagattttttttccaggcactgactccgaagctcccgcacggatcagatcatcattagtcccaggggcggtcttgccatttctagtcttaaggagcttagttgggccctgcgcatgcggtggctttggctccaaaagactgagcctagccgaccatggtgcaacctacctatccaagtgccgaacaaagcaagggctttcttctcgatggtgttgacttgaaaggttggtaatggggctagtactttgttttggactgataaatggattcatgggcagaaaattgcagatctagtacctagactatttgatgtcattccaaaaagaatcactaacagaagaacggttcagggggcgttgacaaatagaagatggatctcagatatcacaggaactctttctgtggggtcttagtggattatcttcatctttggaatctgatttcagattttgagctgctaccagatgtggaagataaacatatattcagtattgctgcaaatggggcttattctgctaaggctgcatatgaagggttgttcattgggtctgttcatttcagtcactatgaaagagttatggaaaacttggacccccctccaaatgccacttcttcctttggctgacgacgctaaataggcgttggacaaggggatc

SEQ ID NO: 9049 - DNA, 599 bp, Zea mays
ttctcggtaccctgcggtacgcggccgtggtgtcctccgctctgctctgctctgcaccagcgctggccagccgcgcagccttttggccatagagtagagacggtctctggcgcgcgtgatgagtggctcgctgatcggtgcgcgcgccgcggcagggcgagccatgatgcgatgggatagcggttggcgcgggcgggcagggatccgacggctggtggtgggagcgccgggctctgccgtccgtcccccccggccaccgcgaattcctgcccctcgtccgggaggcagcttcccctgccataaaacacactccgcccgcctccacgtttgcatctgcgccgccagcaaaaccacggcggcaccccgccgtagtctacaccgtccgggcgacgcaacctttttcttttgtagcatctcgatcccgtactccggagagatgtggactagtacgttcagcttcctttgtctgctcaatgcatccagcgatccgccgtccgcgacagtttgaggcggataccgcgaaacggtgccaggcaagctaagatttgggccacgaaactttggtatgggctacttttgacagacggatacctcgcgca

SEQ ID NO: 9050 - DNA, 680 bp, Zea mays
ctcggggattggcatatggtgccactgggtcttgtctttagagttactcgcattgtcgccttcagataaacatctggagggaggcttggggacctttggaatttcattgactggacgatattcccttcccatatgaaactgattagcacttgttttagtcacaggggtgtcaggtagagcatatcctattgctctagttccatatgataggttagatacatctcctttcggagaaatagttggttttggtagattctctatagctgatgccaaagagcgaccaattgaaccatttggagaaaccactaaatctgaatcacccaaaaggcttttcgcacgttgtagtgcatcgacagagatagccattgatcggccacctgcagtgctgaacctgatagaatgctcaccaacgtaagaggtagaacttttagaaaatccaaactgctgatgtttatccatatgtgtggggttttctgttggataaataaaacccttatgagtgccactagaaattgcatgtgcagatgcaacatcaagcatgtgttctggatttccccgcttaacagttatctccgtacctaacttatcactcacatgtccaaaaaattgtgttgaaagggtattctcctccaagcccaataaggtagcagctctaaaaacaccaagggggatcctctaga

SEQ ID NO: 9051 - DNA, 971 bp, Zea mays
tgctcctgaaaaaaacaaaagtcaggttaagttacctgcagatggtcgtaccacagcgtccactcctggacggtcttgagcccgagcttgtggagggtgagcctcatcgacgtcacggggatccttccgtcggtgtcgccgctgaacacccacaacctgaggccgccggcgaccagcttgcggatgacggggagggtggagaaggcggcgtcgttccaagtgtagatcgcatcgctccatgcgcgaacaacagcacagttcgattcgagcttttcagtttcggtgctcctaaaacctgaagagtaatgagagaagagagagaaagagagagaggcacgacgcacctgcagcgtgtccagttgtagccgatctttgtcacgttcgcgtgcagcgccgcctggaagtcgggtcgattgaagtagacctccgagtactccgccgtgcaggggtcgtagcccgctggcttcatgatccatcctcgctgcaattcatcaagatcgatgcgatgcatgcatgcatgcaggaaaaaaaacaaaagatgagaactgaaacgaagaaatgcacaggcttggatgatgctcgaaagtacgcacgcaacgcacgtatctggagaagatcccgggggcggcgccgtgaacggcaaccttccgcgcgtagggcgccgacgagctggcggggtcggtgcagaccggggtgtagaggctgtacatgtcgatgaggcggtacacggcgaagtactcctggagcgcggcgtcgcaggcgtcggtgacgttcgccatgccgaagtcgcacctggccttgacgtcgccgtacacccggtcggagatgacggcgtggtcccaggcgtagtcgatcatgcccgtctggtccgtctcgtcgtccatgagcgcgttcccgaccatcaggcccttcaagttgacgtggctctgccttgggccccgccctgttgccgtcgaagatctttttcgaca

SEQ ID NO: 9052 - DNA, 595 bp, Zea mays
tggtgaagcagcagagaaggaaggcggtggttacatctggaggcgcctcagatgacatggaagactgaaaaaacaagtctattgaagactgaaaaagaagtcaattgaagactagcgtagcggccctgggcggctttgttttcacaggatggtattctggtgttgcgatgaactagtcttcatcgggatggatgttgtaggaccttcaggttttttttttattttttttatggaggagctgaaagtttctgacttgggagagtgagggagtttgacttgttttgtttttgtggtggcgttaagttaaagtaagaagaagatgttagataatgtttgctccctgttcattctgctgtgctggccttgtatggtattatggtggctgtgaatgatggagactgagattgcgtggtcctgttctgcagcagcagcagaagacacgtatgcagacttgaaatcagccgcgtcctgtatgatctaccaaaccaagccatcgtcgtcgctgtttactagacggatacgggtccctgtcatctgacatgcgaactcttgattcgtttcattacgcattgaattagttagtaacagtatggca

SEQ ID NO: 9053 - DNA, 629 bp, Zea mays
ccctgcggcccgactctagaggatccccctgggagctgcggagatgcagcagcggcgcaagtcggtgttcgcgtccgcgccgttcgcgatgaagcaggcggcgctgggagccggcgtggcggcgcgcaagaacggcgcgccgctgtcgctggccgcggtggtgttcgcgctcttcgtcttcgcgacgttcctctacaacgaggacatcaagtccatcaccgacttccagttcagctccggcgccatccgcgccaagtcccccgacctgcacctcctgcaggaggccgaggccgcggcgcacgccgccgtgaacaccctggccaagcgcggggaggaggtgatcgtgcgcgtcctcgaggtcgaggcgccgcccgtcgtcaacactagcagcgtgctggcggccgccgcgaaggccagcgccaaggccaacgcggtggacgtggggcaggagaaggagcgggacgtgacgctcccgacggtgacggggggccgaggcggggccgacgaggcccagcggcgcgctgacgaggaggtcgctgagaaggccgcgtcggcgaaggcggcggcggccaccgccgcgctgcgcggcgtggtgagcgtgccgcagacgtgcgacctgtaccggggca

SEQ ID NO: 9054 - DNA, 1660 bp, Zea mays
aacctgcattcgccatgccaaaaccttaatggattggtgacaaaaggatcataaaacctgaagaaaaccttataaatgaagaaaagtctgatgcagaggaacctgataattttgtggactacaaagaccggaaaattattctttcttcaggcagtgaaaagaagcttgaagaggctgcccctgggcttattttacggaagagaaagtctgctgacgagtcagttgccagcgaggcaaattcatcttcggttgaaagtgaagcatcagttgctgatgctgtggcccttctgcttaagcataaacgtggtctacaaacctcagaagaaatggagaatgagactgaaccatattctagcaagaccgaagggaagaagtcgaaacaaaaacgtgtattgggcccagcaagaccagatttccttgaagccagacaagactctgaaacatgggtgccacctgatttatttattctcttatttggaacgttatgacaacaagaagccactagaaagaataaaggaacagaatgcagtgacaccaccgctccatcatgtaggtgttattacaaatgttagtactaaccttttatgtttatatttgatcaaacctaaaatggctgactcattaaagaatgagaaatgacaaacttttgtgttagagggagtagataatggtgatctgtgcaagctaatctgcagtagtagtcaccagccgatgatcatgtgtttctctgaattctgaaacctaatcctgcttcaaaatggcatatataattcctggtcctctcgaaaaggcaatagaacctgagcttgtgatcttgttttaggagtagataatggtatataattcaagatgttaagtatatataaacatgaatcgtatatgaacccagtttctctgcattctgaaacctaatcctgagatgatgtgattgtgatccattgactggaggatccatgcaaatctcagtgtcaccttctccagcaggcaacaactgactgtttgttggtgtgcagtgttcttcaaactattcagcaactaaactgttcaaacatgttactgaagattggcaggctatttgagttagctatcaggtagttggagcagaagcactttcgttagtatgcaatatgtcctcgacatttgtgaaaccctagtataaaatcactgaatattttagagctatggtagcagctcctagcccacccaaagcagggtacactgtaataggaaaagttttatacgcctaaaagaatcttgataaccatccgaccaatccatcaaataccacactgcctttgtgtactagattctaccataacattgatgtgaaacatctttttctaggaaaatatgtacgtatgccactagcctgtcattttacacctttttcacacgcaggaagaatcattgatcttgagtggcccaaaacggggacttgcattgtggttcgatgctgattatgttcagactgatctctgggtcaaggattgtcaagggcattgcaaacaattcagtaaggggatcgtgaggatcccaggcagtcaagtgtttgaccaatgtgagcctgaaacaaaatctcaagctaccaggctcagtactgtggatgtgacatatgacgttgtggaatgtacggtgcaggcaactgggcaggggggtctct

SEQ ID NO: 9055 - DNA, 617 bp, Zea mays
tggaaatgtgaaattccttgctgggtttggttctatgcagagtgtgccctacccgactcccgagccggtggcggtggcggaagcgaagagcaagaggaagagctctggcgccctctctggcggttgcacttccggaaggtgctatttcatttgttgcatccatgtgcactgcactgccagtttctctcacctcctcggttggtttattgagctgatattgaaattatgtgcggtgcacaaacacaaagcagtgccggtgggagcgagggctcatcagataaaagagatgctacccatcataaggtgccttgttggtcattacacctaactgcagcaaaccctagtgctacccaggccgtcttggttgatttgattgtgagttttatctaggtattaccttctgtaaggaggagaaagtccagcggcgccaatgtacaaggttggctatcataatccgtaatggttgctttgcttatataagatacatgcaatgcggtagctttcctgttgtgaattttgatgggtatatagtatgcctggatctggtggcgttgcagcctgacggttggcacttttcaggtgagccatcgcaggctgcgacagctcaacatgctgca

SEQ ID NO: 9056 - DNA, 603 bp, Zea mays
tgccgattcgaaagccctcgtcttgtcccctcgcaaaaccctagctccaaccaccatgaagggcaaggccaacgcctccaagaaggatgagggcaggtacgatctccgcgacttgcgctgctcctgtggcggaacgatggttcctcttttccttgcgatggctgcacggtgctcttggttaagattttgtgcggttgttgttgcaggctccgggccggcggcggcggcgccggaaagcgcaagaaggccgccgcgagcggcaagcccaagcgccctccctccgctttcttcgtcttcatgtgagttctggctgcgtcggcgagtcattgtactcagatctcagatctctagatctattctccatttttgttaagagtgtggatcccccaccctcccacccccaattattgagcgtaccgtggcgtttgtttgtttttcaggtctgaattcaggcaggagtaccaggcgcagcaccctagcaacaagagcgttgcggccgtgagccactttgcactctgttctccctttattttttttccatgttcgtctgcagatgatgtcttattttttcgcgtcagaggattaaggggatccattagaact

SEQ ID NO: 9057 - DNA, 627 bp, Zea mays
tgcttgagccgagtcacctcatccgaagattcctgcagcttacagcgttgattgtccaactcttccatggtgaagcgatgactcctctccaagatagtcagcgagttgctagaatcacggtacaatctgtcaagactgtcgcgagaagcagcaaggatacgtttttcttcctgcgagcaaaaagtcaactccctcaaaaaccaagcaagcaataggaacgcaacaaggcaaagcacagttttgtaaatcaccttttcagaattgagctgagcgtgaagagaagaactcagtgcattggcatcatccaaggcagccgagacctgacccagttcggtctggctttgagagtacttttcctcaaagtcagcacaccgctggaccaattcagcctgatctcgggaatgtttttcctcaagagtggaaatctgccgagtcattcctagcaaaagataatcaaacaaaacggggtcagaatgtaaagcagtccacagtgaaggcaaagagaagcaaaaaagcactaaccagcgttggtcgcctccaattcagagacacgatgttgaagtgacactggattccaacatgcaagagacgaagctacttccgggacagaagcaccctgtaacctca

SEQ ID NO: 9058 - DNA, 520 bp, Zea mays
tgtgtggagcgtccgacgtggacggggacggcctgcgcgaggacggtgtcgccgagggcggcgctgcggaagtggttgatgctgagctgcacgccggcgacgcggcggtaccccgacgccatgtgcgcgcccatgctcgccagcgcctccgccaccagcgccgacacgccgccgtgcagcaccttgaacggctggaccgtattgtgtcagcgaggtcggcgtgcgggcgtggcgatgttagcttattagttaagctcgctcgccgcgaggaggaggaggagcactgacctggcagcagatgggagtgatggggaggcggccggtgagccgcgacggggagagctcctccatctcgaacccgagggcgtgcagcggcgcgtccagctccgccatcatggccctggaatcagccgccgctggcgaggccggctgctgctggcgctgccgcgatccgaccgtggcgtcgtcgtccatggcacgacctgctgccggctgccgcgcgcggggtagttgggcgggc

SEQ ID NO: 9059 - DNA, 577 bp, Zea mays
tgtggtcgtgcaggcaggccatggctcctcgtgctcctcccccgaccgaatgcggccaccagcagccgtgtcctccttcgatttgctatcgtcttgtcggttttcggagaccggactccttgcagctcctactctcctactgggcggggcgcgtatataggtgggggattgctttgcttccctgcctccgcaccgttgctgctctttcggcctcgcgcaggttgcagagaagtctagagggattctttctccgtactcagccgtggcgtggggacgcctgccgtggtaattgtctctgattcgtaccagagccaacaaagaatagatcagcctgtgttccaattccaactcacaacagcctgaagcccattaaataatacagaggaatcatataagaagtttatatgaatcaatatatttttactgaaaaacatagaaaaagtaccaaattcaaaaggggactggggacctgactattaatcttctagtttaaaatctattctataaaaatataaacaataaagtagtctacatgtaaaataatgttttatatgactatatgtacggttccttggca

SEQ ID NO: 9060 - DNA, 646 bp, Zea mays
tgaaggaaactaatggtagtcttgaagaaaagatcaaagaactcaaggttattcagccttttcttttgaacactgttaacccaaatataatacattgtacttctgtggtgcgagcatgcccttgtgttatttaggaatccataacatttcccagtagcactcttatgttcatttacaattatgcattctttatctaggctggcaatgctttatggtattggtagcttatgccctgcacatgaatacactgtgattgttcttgcatagctcatccaaggcatttcccagtagcttacacaaaatcagcccctggctgataacagactacataatccgttagtcgttacccgtatgttgattatgaacaacagagcacaaagcatgaattggtcatataaagacttctagacctgtctatggtgagggtatgaacacaccaggtcttacccatgcccaaacccatttttgaaatatccattctacacacctccccataacccgcctacccattggacaatctggttcatctcactcattatggtgtgcttgcctgcttgggctcttgttcacatgtgctggaatattcgtataacactacaagtctagtgctgcgggtgaagtgacgtgggtttctcgtcgctgctgc

SEQ ID NO: 9061 - DNA, 536 bp, Zea mays
ctatgcatcatcttatctgtgaaatttccctaggctttgcacgaggctcttatcaggcaagaggaactgctcgcgaacatcgacagcaaggagattgccagggctcaggttcccagtgctacatcatgatgttttcctatccgtgttataatccctgtatcagtctctgatggccttgcttcctgttgcagagaaagaagaaaacaatgttctgctactaggacaacacctgcttccgtgaggagatgacaaacgcggcggaccccttcatttttctgacacttgtgaatcaacaggtttccgttgtaaatcaacaaaattctggcataaataaaatgttttttttttaaaaattgcaatcctgagcattgctgcctcctcccggtctcgcaatctggttgttgttagttgcagcataactgcataattggttggttagccgcgccgatgataattggttggtttcttagctgatgcgtatcgtcaagcgtgtctcgtcgattgattgttctgactctgggtgaattattgagcag

SEQ ID NO: 9062 - DNA, 613 bp, Zea mays
ggccgactctagatgatgctcctgccccgccaactccaccatgctcgagctcgacaacacgcagttcctcacctacccgccggagatcaccacggagcagttcttcgtcggcatcaccgcctgccgcctcaactgcctctccggcggctcctgcgtcgcgtccacagcgctctccgacggctcgggcctctgcttcctcaaggtgtccagcttcgtcagcggctaccagtcggccgcgctgcccagcacgtctttcgtcaaggtctgctccccgccgctgcccaacccggccccgggcagcgcggcggcgccctcggccggcggctccggcgtccgcgcctgggtcgtggcggtcgtggtcctgggtgtggtgtccgcgctggtgctctgcgagtgggcgctctggtggttcctgtgccggcacagccccaagtacggcccggcgtcggcgcagtacgcgctgctggagtacgcgtcgggcgcgcccgtgcagttctcgtaccgcgagctgcagcgctccaccaaggggttcaaggagaagctgggcgccggcgggttcggcgcggtgtacccgcggcatgctggcgaaccggacggtggtggcggtgaagca

SEQ ID NO: 9063 - DNA, 552 bp, Zea mays
tgcgcggttcggtttggaaggcggcgcctgatttcgtcttcttttttttttctttcttgcggggaatcttggcaggaaggagaagcggatgaggaaggtggacaccttcgcgccgcacaacgatggccaccaatggaggaagtacggcgagaaaaagatcaacaacaccaacttccccaggtccggccggattctacatgttttgtttgtttttactttaccgtggggtgacaaatctatcctcgccagcgaagaacccggcttttattagccagcctcctttgacttgaatgtttggtaacttcctcttattctccgcatcaactatcggcgggccaaatcccagcaaaaatgttctttttcactcgctcacaggttcttgtcccgctgcaggtattactacagatgcacgtacaaggacaacatgaactgcccggccacgaagcaggtgcagcagaaggaccacagcgacccgccattgtacgcggtcacgtactacaacgaccactcgtgcaacagcgccttcctcccgctctccccctccgagttcca

SEQ ID NO: 9064 - DNA, 691 bp, Zea mays
gtgaaccgtttgtaagatcctttagcttgttgcttcaatataatacaaaagtttaggccatgaacttgtctagccataataaaatcttctgactcctatgtttgccttttgtgcacagaaatagtattcatccatgcttaaagaggaacttcccatgtgttgcttcgaatggacaatgtaagttgatctctagtattcacagttagtttgaaagcatcagtacatcataatgcatcgagaaacacctcgtgtcctcagtattagatgaaaacacagtttgttacgtctattcctaaattagagagagctgcgtctctctaccgtgatttacgatgggttagttgtggattacgatcccatctatgtatatccctatcttctctcttctctctatcttctctcttctctataactgcatatatcagcaatatataaacaccggccgtgacccctagagggcattgagccaagccaattaacattatcggtgccaagggattaatcactcgatccatgttcattgttatatcctactcctgccctattgccgtctcaactcctgcatcgtccatcatgtccaccaccacctttcccctccaccacgctgtcaccatcaagctcaacaaaaacaacttgctatggcgtgtgcaggggtaccagctagaagtagtgttagttctagtttttttct

SEQ ID NO: 9065 - DNA, 1181 bp, Zea mays
tgagcagttctcaccagaatgtctcctagattgcttggatctatcatctgagcaccacacacttgaagtggcaaacagaatagaaggtgccatccatgtttggaaactgaaatgccaaaaaaagtcgacacctcaagccaaatcaaagatatcttggggtggaaaagtgaagggtcttgttggagataaggagaagagccacactttgtctgaaagagctgatggtctattgcagagcttaaggttgagatatccaggcctgccacaaacttcccttgacatgaacaagatacagtataacaaggtaaaggtcatgcataaacaaataaccatggacttattctctggccaaatcaaaatcgatcaagtctttctttcagttacacaaaccacaatcttcactttgtttcttgcgtgtttttaggatgtcgggcagtccatacttgaatgctactcaagggttctggagagcttggcatttaacataattgcaagaattgatgatgtgatctatgttgatgatgctacaaacagatctgaagtgaggatctgagcgtacgcccataccaacgcgacacagatgaaaagggagaacctttccagtatggggatttcttttatctgtatgttcttcagatactgcgaaacaaccgaaatgcagagatcaggtacgcttaaactcgccaagatcatgaatttggtgcgtagagagaactgaataatctggagttttttttttttttttgccagtcagacctgagacagcacgacaaagaggatcagcattggcaggccaatctcaacgcatctcccaacctgatgcaattatcagacatcaatcggatgagcaagccattcctcgtcagcatacccacgttgggaacacgaaatgggggtcgggacaaagcgagcggtaccacagggaaacctctttcgaagaggccaaatccgagcagcgcaaccactggagtcatccccactgggctgaagaatctgacattgcgttatggaaccaaccagtattcagtatagcctaggcactgtcaaaagtcaaaactgaaacggaactacttggtagtagattggtaaatttggtattgctcttggaaggaaagagcgaagtgtgaaggaaagcgacctggagaaaataccccacagagggatcctctagagtcgttccc

SEQ ID NO: 9066 - DNA, 595 bp, Zea mays
tgttgcagtcctcattggcagatttttcttttatcatgtgttttggttcttaacaccatgtttcttagggtactttgctcttttcgtgatgaaaacatccttaaatgatatgccttatttatttggataccaaacaataacaggctaacagctacagaatgtcagaatcaattatttctttcatgaactctcttgcatttagtagactgaagggataaaaaggaaagtaatggcaaccttttggaagaaaatatagacacttgaaagtcatgcagaaacatttggtgaagcacggtaactttgggtgtaagccgatggtaataaagctcaaaataaacaatttttttttgcaagccctggattactctgtcatttcgatagatacctcatgtgtttaactgaaacctatcttgtgatgcagttctgcattcttctctttatttagatacctagagtccaaacttgcactaaatacgccgtgatatgctgtaggttgtggcaattaaagttatccggaataagcagaccggacagtctgaaggatacggatttgttgagttctacagccatgctgcaggggtaccgagctcgaatt

SEQ ID NO: 9067 - DNA, 550 bp, Zea mays
tgccttttttgttaggtagcacaaaacatccataaccaggatgaaaagcattggggagagaggatctccctgccgaagaccccttctatggagaattttctgccctggcgcaccattaaggagaacttgagaagaagcagatgcaagaagagtgttgataatatcacatcaaatttgcccaaagcccaaatgcttcataacttcgaggagaaacggccatgagacagaatcaaacgctttggtgatatccaatttaagaagtatccttgcacaatttttctggtggagcataatggttgtctgttgaacaagcataaaattgtcaagaatggatctgtccttaataaaatcactttgattctgagataccatattgtcaaggtgactagccaatctatttgctagaagcttagtgacgagcttagcaaaggagtggaccaagcttataggccgaaaatccttgacctggcaggcatcgtccttcttgggcaagagaaggatgtaggctgagtttagcagatctaaattcacccattttctgctccaaaca

SEQ ID NO: 9068 - DNA, 630 bp, Zea mays
tgcttcaccgtctggaaccattcctggaagtggtacgtcatattggtcgcgtccttgcccttggcgccgtcgaaccaaatctccgacacgctcccgtacctagctttagtttgtttccgcacagaatcgctatgcaagtaagcttacataacatttgctaggcgatgctctggttactcgccgcatagccggccggcgtgcagctcggaactgacccggtgaggagctcgtggagctgggactcatagtactcgttgtacgcgacctcttggccgtaccgctcgtcgtgccggtcccacggcgagaggtacaacccggtgtcaacgccgcgcgcgcgggcggcgtccacgaattccctcaccacgtcgccgcggcccccgcgccaggggctggcgcgcacggagtgggccgtgtactcggacggccagacgcagaacccgtcgtggtgcttggcgacgaggatggcgagcgaggcccccgccgcccgcgcagcgtccatccactgggtggcgtcgagcctcgcggggtagaacagggacgggtcctcccaccccgtgccccactcggagtccgtgaaggtgttcatgccgaagcggaagaacatgatcacctcgcggcgctgccatttca

SEQ ID NO: 9069 - DNA, 569 bp, Zea mays
tgctcaggacctcggtgcccgcgtctacgcctacgcaaggcgacggcgtcgccgtcggcgctccgatgcagtacttgtccggcagcagttacctgcctttcggtggcccgctgccgtctcaccttctcttgcaggccctgcaggcggctaagcccaatagccgcagctccaacgctaactctccgacggcgaaggtaattaagagaggcatgcatcagagtcacgaatctagcctgcttgagttcgtagctgctatctagggtttcgttcgtcaataagccatagcctcagtttcgcttgcgctccaattccgagtctttccaggacgactgttctccaccaccggcggcgacgaggaaaagcgtctccgagccgcctgcggccgcgaaaaggccacggatcgaggcgccatcgccgctgccgacttttaaggtgaagagcgatccgagttggtttctgtttcaatttttcagccgcagttggccgggtggctgcgtcgtctctttttgttccttttgatgaatgacattttggattttacgtctgctgcatcgtcgatggatgatgac

SEQ ID NO: 9070 - DNA, 571 bp, Zea mays
tgtgacatgttaaggatttaagaaccacaaaattaggtatattcaaacccctcatgtttctgtgtcaataaaataatagtgagacatgcgccaaaattcaaatagacaaacatgcatttggtaccatttatttcgtatgagtcaataaagcatatttttgtcgaagtcaaactacggagaaaggtgatatcagagctaatgtttagcaattgatcaacttgtcagtcattcagtaatacacatttgttggagttagtaccctcttatgcgacaagtacaacatgagtggcaccaagagtatgttacctgaaaagacgccacaatgatgctactgtctgaatttgtcttgaatataacgatgagattaaccagtgaaggatggtaacatgcaacgtagcaagctggataatgtcaataaagaatgaaactggagctgtaagtcctaaaataattccagagactgcaatgccttgaattatatgtctcaggtagcctccaacgaaaaaccaaagggtagagtaaatttgaactgcattaagagaaatcatgcctaagagctctgctaactctg

SEQ ID NO: 9071 - DNA, 592 bp, Zea mays
acttcactagtaaatactggtgggccgacacattcctcacaatcaaacttcagtctcgatgaccttcttggccttggcgttactgaagctcctgctccaacaccaccagcactgacccttaactcgaagcctgtgctagatcctggtacgttccagaggaaatggggccagctagcattggcgctgtctcaggtacgccacatagccttttcacatcttggtcgattttcttacagtttttgcaaagtagaccactacatgagatcttttgttacggttgtctaatgtatttgtttctgatggagtatgaaactagaagcccgttccaattcatggcctaatgagtaatgaatctaaaccctgagtgccatggttgtctagggcgtcgatccacctttaaatgtctcccaatgtgtctgatatcaactgccctatgttctgatctatgttctttctattatgatctgaactgttttatactgtgtttcgttgacaggaatgctctttgagtccacaaggagcagcttcattgatgaatccccaatcactcatccgtcatatgcaaagcaattacatccaatgtattgcttca

SEQ ID NO: 9072 - DNA, 613 bp, Zea mays
tgccgtcggttggtcggagaaccggaactcgctgccaaacccacgggactgctggagtgtctgggcgaaggcctggtacttgcggatgtcggcatcactgacactgcggcgggcgtacttcatggactcctcgaagtgggcagccatgatctcggcaatgtcgtccacctcgtcttcctccatggcctctgggttgtccttcctgcgcctctcccgctcgatgtcctgaaaccaaatgcctcggagttagcaaaacaactctgcatagccaaatactgcaaaccgattccgagcaaagggattattaccttctcgatgttctccctgatggcatacttgcacgcacgctggcagatctcggtgatatctgctccgctgaaaccctgggtgtacttggcaagagcatgcaagtcaacgtccttagccacaggagacttcctgaggcaggctttgaagatctgaagcctggactgctcatcgggcagaggaatgtagataagctgatcgaggcgtcctggcctcagcaaggcagggtcaatgatatctggtctgttagtcgcaccgataatgaaaaccgtcttcttggcattcatgccatccatctcagtaagca

SEQ ID NO: 9073 - DNA, 640 bp, Zea mays
agcctaatgacccatgatttacgaatttcgaggctcggttacccctgtgcgtattaatccccgtgtctcctctccgtccctcatgtcagcttcgggcgatgggagggatccgtgacctaatgccctgcgctgcgcaggcgggagagcgacctcgtggcgtcttgcagcctcgcccccatcatggtgtcggctagtattagtatagtacgtacatggcttgcttaatgcttgggctttcatgcatatgccctgctctgccctgccctgcccgggagggcgtctacgtctccgacgacgcccgcgtcgttcgttggtcctgactcctgagcttgcaaaagcttagtggggcgggcgatgaacgtacccagacgagacgagagtgatcataaaaaaaaagggcgctagctagctaggcatcgtctttctaagaagacgttaaaaagccttaaagggtgcactggtgtgtgcgctactgatactcgagtgcaggggtctacatgtaacgataatgggcagcacggggactaattcactttgtgcttaaacaaaccaaaagcttgcattggtgggtatagatatgtctgcttaagttgaagcaaacatttgtttcaaagcatgcaggacgatctttgttagcgca

SEQ ID NO: 9074 - DNA, 1216 bp, Zea mays
aggatcccccttgatgacttccaactccagtcacttctgtggatctatttcagtctttggctgctaattttcgaggagcaaggacatgcatgctctgtgggaaatattgcatttttcacctgctgcttcgtagttgttgagccaaatcattgtgtattttgcttggcgtttactcctgctgttctagctataatttagctggagaaattgaggattatggcatactagcatgtgttctggattgcagattgcattgcttacttctgctttaaggaaagaagtattaactctactagcacgaaccccttacccagcttctgagcttatttatggcttcgaagtacagatccaaatttctcaagtcatcaaacacaatttatttttcacatggatctgtgacatcattatgtctgtttgcgattcataacgtttgtctatgtgtgtttgtgattcattatcgtttgtccacatcttataccatggtccaactttccattccaagtgtagtaatcatagtaactggaagtctggaatttattcagtggcccgccaaactcggatgtaatgagtcttcactttctgacgtgcagttactgccctcaacacgctgtttaccagcatgaattcgccgggacagctacgtctccgacgacggcgcgtccatgctgctcttcgacgcgctgtccgagaccgccgagttcgcgcgccgctgggtgcccttctgcaagaagttcgccgtggagccgcgcgccccggagttctacttctcgcaaaagatcgactacctcaaggacaaggtgcagccgacgttcgtcaaggagcgccgcgccatgaagagggagtacgaggagttcaaggtgcgcatcaacgcgctggtggccaaggcacagaagaagcccgaggaggggtgggtcatgcaggacggcacgccgtggcccgggaacaacacgcgcgaccacccgggcatgatccaggtctacctcggcagccagggcgcgttggacgtggagggccacgagctgccgcgcctcgtctacgtgtcccgtgagaagcgccccgggtacaaccaccacaagaaggcgggcgccatgaacgcgctggtgcgcgtctccgccgtgctcaccaacgcgcccttcatcctcaacctcgactgcgaccactacgtcaacaacagcaaggccgtgcgcgaggccatgtgcttcctcatggacccgca

SEQ ID NO: 9075 - DNA, 527 bp, Zea mays
tgctacattccaatgccgctcgcactttctgatgaggagaaggccgtgcagaaggagttcaagctgatcgcgagcggatgcatcgacctcctggttgatgcgatgcgccgcacccccgcagagaaaaggcgcccactgttcttggtgaagtttgatctctgctagctgttcttgttgctactagctgcttttgatctggtgttcttgttgctgttcttgttctggctgggttgcactaatcgatccaacgactgaactgctggctgcttgatttgtttgggcacaggtgtttggtgagctgtacccggtatttgagttagtgaggtggactgccgagggggggtgtgccaagtggtggatggcgctgcagatcatcgagaagctggagatcgtgcgcaagatggtgtcgggcgcttgcggcggcacccctgttgacagaggcacggtgttcgccaggaaggtggacctcaccggtgtcgacggcgaggcgctcgccggccacggcctcgggagcaactttcaggggt

SEQ ID NO: 9076 - DNA, 671 bp, Zea mays
  unsure (1)..(671): unsure at all n locations
gcggcggttttggcacggaccgaccgctccctgcacggctcaccgtccagcaccagaagcggccgccgccgccgccgccgggttacaactgatcgatggtggatgattaggtatccgtatccgtggattatatacttctcgcgggcgatttgcgatgcgacccatacaagaaagaaatcagttaaactgcgatatgatgcgctctagctagttaatcatatatacatatatacacgtccgatccattcgtgtggatgacatccatgttgcatatgtacaagtacatgtctcttcttcaagagtcaagactagctgtaattgagctgagcatacttggtgttgctgttgttcagttaatttgcaaaaacgcacaacacaagaaagaaggagaaaaaaacagagtggaaatgttttttttttttgaagatctggagaacaacatgattgagaagggagggaaggtgattctgagcacagttttgttggaaaggctgtagttaattctggtggatgtaatatattatatgtatgtatatgcttagattcgttgatatatatgcatatatatgcacccacatgaatatgatttacagagattatattaatttgttgtgagtgcatgcccttttcctggatgctatttttatttcttgttagttgcntcagatctg

SEQ ID NO: 9077 - DNA, 585 bp, Zea mays
tggcgccgagcatgggctactccttctcctactgcctcccgacgtcgtcgtcgtcgtcctcggggtacctgtccatcggctcctacaacccggggcagtactcgtacacgcccatggcgtcgagctcgctggacgactcgctctacttcatcaagatgaccgggatcaaggtcgcgggcaagccgctgtccgtgtcgtcgtcggcctactccagcctgccgacgatcatcgactccggcacggtgatcacgcgcctgcctacgggcgtgtactcggcgctcagcaaggcggtggcgggcgccatgaaggggacgccccgcgcgtcggcgttctccatcctggacacgtgcttccagggccaggcggcgcggctgcgcgtgcccgaggtcaccatggccttcgccggcggcgcggcgctcaagctggccgccaggaacctgctggtggacgtggacagcgccaccacgtgcctggccttcgcgcccgcccggagcgccgccatcatcgggaacacgcagcagcagacgttcagcgtcgtctacgacgtcaagaacagcaagatcgggttcgccgccgccggctgca

SEQ ID NO: 9078 - DNA, 664 bp, Zea mays
gacccctggaaagcagtgaacccatacaagacagtaattgtgattaatcagacgacttgatacccctgaacatgagaacaacgaagttaaactgcttctggactgatcactggactcatgaaaataatgaagatccaccacctcccggagttcaaaaatgtgtcccttgagtgcagaaagtggaatctcatgtaggttggtctaataaaggtgctcctccgatgaaataggattcctacttgtgttcagaaggaccacagtaagagaatcagcagaacaaagagatccacatctctaggcaatttatacactttaacaaaaagtactggggcacagattcttgggtatgcaagtgctaagcagaaagcagcagcagagcatgaggcaagaacaacaggagcaatagagctagagcagtaacagcagagctagaatcagtggaggagctcattttcaggttggaagaaggaacccgatgggcagcggtagaatctggtactgcttgtggcctgtgggacaggatccggcctctggcaatggttgcacccagcagaggcatgcaggcacaaggcagcaacgggagccaatggaaatcagtggaagggatcaggttctgggcagggcagggatgtgaaccagcccacaagcttcggtggcagcagca

SEQ ID NO: 9079 - DNA, 622 bp, Zea mays
tggtagcgacagagaggacagacggcgttgcgatggagccactggaagatgcagtgctggtggaagatatgggagcagggcatggcccgaagcatcgacgtagctgccgcgtcgtccttcttgtgatcaggaccagcgatatcggccaatgggttgaggcagatggcacagtcgtcgtcgtcgtgcttagcggttggcaccacctccttgagccctaggatggcttcgctgtacgcggggatgcaaggacgcttgttgttgcgagcagtagcagcgtcgtccccggcttcctcgtgtgagggcggggatgggaatggggatggggatcggggacgggttcgaggccggtggcgatcaacgtagggagccaaggccaaggctacatagagatcgtcctcatcatcaagatgatccggtcgacggccgcggttggcgagctccgccccgtccctgtggaaccactctaaccacaccggaactggatccatctccggccagtcgtctagctactagctactagctagtgggcggtgcagtggtggcggcgggccggcggcagatggcaaacgacgatgatgggatatttaggagcgaggtttcgataagcaaaagcaggaggcca

SEQ ID NO: 9080 - DNA, 568 bp, Zea mays
tgctgattatgggctcgaggggtgacaacatcttctgacaagaaatccatctcatcccactgcgcttcttttatttttaatgttaagaacatcaagctgtaacaactacataacagaacagatgattttaaaccagcttaatgaatgattatcaaggatacgttctgttttccacatatcagtcatgctaacatccccctctgttaggagccagtaatcagaatccgtctgcaaaatttgtgtagaatggcaagtcactcaagatagcacaacgacctactttaacttagcaggttctgtaaagatttgcattcaggttctaggaagtaaaactcaaaagcatatgaaagattcatatgtcatgcgcattgttgtatcatttttttatagcacctctgcaatctagatataatttcagatagggtgcattgttaacaataagctttatgagcatggcaaagcagggaaaactaaaattcaacttcacaatgatctgactttgccttgtttgggcattgtattgtggtccatttcggacctttctctctctcaatataatgatgcgcag

SEQ ID NO: 9081 - DNA, 601 bp, Zea mays
tgcttctagccttgaaaccatatcactatttccagacgcctctcttagtttcatttggcgcttcgaaacttcaatagcctgcagaactcaaaaaccaactctctcagttcatcacaggaacaaaaaaaaaagaactatatagtatgcctaagtggcttcaagttatagaactaaaaagctttgtgaataaaatgggaaacgcaagtggctgagcaatatttggaaagaagaataagtggagagaaaaaattctcaacaatgtaatttcaagaaggggcgagggtctggttcgattatcactgcacatttaaaaccaaatctgactgggccattgcagagtgggcggtgatggcccgctagcgatagggggctagggttcggggattttctcagccgagatcatgttttagtctcttcttaatatattaccgggaggacggtctttccctccctggccgagtaaaaccaaatctgaaaatgatattgattagtaagttatcaacataactacttgctacaccaattgattattttagtcatgtctcaagtgctcaactacttcatctggtctcagtgcaacagagaacagactaaaagctca

SEQ ID NO: 9082 - DNA, 777 bp, Zea mays
tccctctccgcggggaacaagccaatggggtgggtggacagctccaaggggtggaatccgcagaaggtagtcaatccatgcagagcaatcgcctcgatcgtgtcctcagcccggtatccaaaggacttagagtctagcgaacgccagcctggctgcaggggatgaggctccaaggtcatcctcaccctacagcggggcactcggtgcttctcgaactgctgcaccgcgtactgaggaggtgtcgtgtatccggccccctgaagtacctcccacaaaatgcggggaaagccctctcgtgcaagcccgtcagtgtgggacagtgcattcccatcgtctgaggatccgtgggaagtcatctgtgtacggttaagcgtaagtaaaagaaaaagaattataaaaagaaaaaaaggaaacacaactcagcctctctctaaatataacaatggtactggggtacttagttggtcattaatttggtattaaagtccttactcaattatccatttgtttaattttaagaatgcatgcatgctcgtcctgaacgacctcacatcaatataaagggaatagggaagaactcccatcccttatagtagcctgtagggcttaattacttagccacctagctacccctctgtcatcctaaggcttcacgtcctaggtctatcctgatcgtcctacgatctatccaacattgtttctatcaagttttactttggaaaaggatggtatttatattttattgattcctctgtggtggtacaagctccgatacca

SEQ ID NO: 9083 - DNA, 543 bp, Zea mays
tgctgccgcagccaatagctggacatgcccaaaattttggtatgtactccctagtacttccaaaaagaacgcaattctcatttcccaaggagtcaaacaatttcaacttcaatcacctacacacagaaaaatataacatcttttatatcaaataagcatcattagattggttataaaatatacttttgcagtaaatctatttgaagacatagatgttgatattttttctatataatatgcacatttgagaaagtttgactagtctcagcctcagaattgcattcttttgggacagagagagtacagctattggattgtgatttgtgactgaaaaccatacatgtagcaaagaaagtgaccgtcttaaaacatggtaaagaatgcttttcagtacgctgtacattctggaacagtggaagtcaataatcataaggaaaaatggtttatctagcacgtgcaagggatcccacttggatagttttagtaaatggtaatgatatcaaggaaatctgacaaattttatgcaacagggctgagccatgg

SEQ ID NO: 9084 - DNA, 646 bp, Zea mays
ttgcagcaggccgcgctggaggacgtgctcatcccgagctactccggcaccgcggagacgctctacgacgtggactgcgtccagcggatcgtcaggtatttcctcgcggaggaggagctcggcggggaggcgtcgtcttcggctgcgatcgaggaggaggaagcggtggccgtggcggcggcgcggccgtccgccgtggtcatggtgcaggtgggcaagctggtggacaattacctcgccgaggtcgcgtcagacgccaacctcaagcccgccaagttctgcgagctcgcgctttcgttgcccgaccatgcccgtatctacgacgatggcgtctaccgcgccgtcgacatctacctcaaggtacgtgccagatcaccacggaacatgtcgtccaggctaaaaggacaaagaaaatatgtctcctttcgagctgtcacgctcacgcccaaagacctccgtctcttttggccacccaccgactggctactaaaatttgcaggcgcacccgcggctgacagcggaggagcgggaccgggtggtgggcgtggtggactgccggaagctgacggtggaggggtgcacgcacgcggcgcagaacgagcggctcccgctgcgggcggtcctgcaagagcctctcttcgagcag

SEQ ID NO: 9085 - DNA, 582 bp, Zea mays
tggggatgctgttttcatattgttccttgtttctctgctgtgtttactgctccaagttgtagctagctttgtcccttggctctgctctgcgtggagggaatcagggaagtggttgagctgctcacgaacaggaacactggaacagggcgagcgagcgagcacattgctgcaagagcaagcaacgtcgctcccgcccaagaatacaggcgaggctttggcagccgcgccggcgcaaactgtaacggtgcccgctgcacacagcctttattagggtttagtttcgagagaaaactggggctgtagatcgaaccgtagacaggttgaagaagccagccagccagctaggggagagcatcatcgccagttcgataagctaagcacagatatttcgctccatctcctacgaactgtgcgtgctcctcagcagttttttttttctttacgtctgtaatctaaagagcagcagcgctatcagtaatttgcccgtcggtcgcagctccttgttcttgctagtaatattttgttatagctatttttgttattgctagttaatttgttactgttatccagattccaacagca

SEQ ID NO: 9086 - DNA, 1191 bp, Zea mays
cgtacccctgagccccaggagtcgatcacatgcatcaccatcttgatcgcttttacatgccaaggattgggatccggatgctgataggttagtgagcttagcactcccatctcatgtccagttttctgaaaggtgtttggtcagtcttggtaagattagcagttagcactttaggtattaacacactgttgataaaaaaagcaatatgtctacagccctaatttagttatctgttacctatggaaagttcccttgctgctactgctttctttcttgcccaaagaagacagggctcctgaggcttttgagcctagaacaaatctaaatttcagggcgcgttttatataaacatgacaatactattacttaatatatatgtaaacaaatgttatcaataaaaaataactgcatgtaaaagtaatattcatatcaaataatccaaacaaacttaaaaatttcttctaccatttctcgacattgagtcattgatgatgccaatatcagcttcatccaacaatcgtttctcaatacataatgtttccaaaccatttaacctctcttgaaacattgtagatttcaaatagttcttcaataattttatttttcagaagcttctttctggaggagggcggcgtcgtctgcagggacgcgttccagcacgccatgtccagcctcttcatcgccatgtgcttcggcaaggtcctcgacgacttgtctgtggacagcatcgccgtcgcagtgcgcgacttcgtcctccacgacgacgggtcggagacggggatggcgaaattcttgttcctccctgctctcaccacgcgactcttccgtgacttcgtgcgggagagggaagccaagctccaaaagctggaaaccgtgtattgcctgccattgatccatgagcggagagagcgcaggaagaagcagcagacgcaggagctggagcacccgcactgctacgttgacacgttgctcgatctcaggctcggcgagggacgacaagacggtggccgccctcctctcacagaccacgagatagctagtctgtgcatcgagatcctcatcgttggctcagatctacctgggacggcgctggagtggaccatggcggagctagtaaagaacccaggcgtgcaggacaagctctacgaggagatgatgaaagccaaaggcactggtggtgttgttgctgca

SEQ ID NO: 9087 - DNA, 586 bp, Zea mays
tgcggtccaacgcggagtactacgtgtgctcgtgcatgaaccggaaccccggcggcgcgaagcacaacgccggacgcaccccggcggggctgctcttcatccggccctggaacaacctgcagtacgtctccggcgccgccttcctcctcaccgtctactcggacgtcctcgcctcgctgggccagcccctacgctgcggctccgtcgacgacggtggcgaaccggccgccggcgacgcgggcgacgttatggcgttcgccaagtcccaggccgactacatcctgggcacgaacccgatgcgcaccagctacctggtcgggtacggcgcggcgtacccgcggcgggtgcaccaccgcgcggcgtcgagcgcgtcgtaccggcacgaccgggacttcatcggctgcctgcaggggttcgactcgtggtacagcgcgcggcaggagaacccgcacgacctcgtcggcgccgtcgtcggcgggcccaacggcgaggacgtcttcaacgaccaccgcggcgcgtacatgcagactgaggcctgcacgtacaacacggcgcccatggtcggggtcttctccaggctcatgca

SEQ ID NO: 9088 - DNA, 591 bp, Zea mays
accccgatagtggagaaataaaatgtagcctagggaccagtttctatatttcgggaggttatcttctactctgcgtatggcgtactcaaataggagtaaattacatggtcattttaaggctcagaatggtcatactgtcgtagtattttgaatctgaatctttattgtactactacgctcaaagaacaatttctgtttgccttgggatcctgatattttttagagctaatgaattgacagtattacatgtggaactagtgtggtcatttggagaaccttaaatgcaattatgacagttatggttgagattagttcataagagtaaattacatggtcattttatggctcagaatggtcatactgtcatagtaatttgaatctgaatctttattgtactactacgctcaaagaacaatttctgtttgccttgggatcctgatatttttttagagctaatgaattgacagtatgtggaactagtgtgctcatttggagaacctttaggagaaacataacatgtgctttcaattttatttaggttgcaacagtacaaaatagtggagatgaagcttctagcacaacaacgagacc

SEQ ID NO: 9089 - DNA, 562 bp, Zea mays
tgttccccgggttatgcctgaccgagatcaccgccgacgcctacaaggtcccggtccccgatgagtagcaaagctcgccacttgctccgccccttattggacagcctgaaaacacatctagcaggtttgttccttatatagagcatcatttgtctcgcgtcccgttttgctggcccaggcaagcaagtgtgtcatttatcttgcataataatctctccgttcttttttatttgtctcaccaaatattcaagaatagagttaagtacaagagaaagatgcactataatttctacactgtggatggagcaatttgcatgtattgatttgtggatggagcataagtcaacctactcagtcggccagtctatagaacctcactggttgttggtcctctatcaagtgagtggtgccacattttctatgacgcccagtctacatgagagtgttcacaccttccaaccgaagaagacatgttgttttacctctacatttagatgcacaacaatgcagatctagccttgagtttgtctctgtctaaaccacaatggttcagtgcagggca

SEQ ID NO: 9090 - DNA, 602 bp, Zea mays
cggtcgactctctggatccccttggagcacgtggcagagttccaggaggaggccgacctctgggtggccgccagcgtggcgcggttcgtcccggcgaccaggatcacgcacgtcctggcgggcgacgacgcgccggcgcgctccccgcccagcgcccacttcctggtcccggcgatggccaacctccgctcggcgctcgccgccgcggggctcgccggccgcgtcagcgtgtccagcgcgctgtccgccgacacgctggtcgacccggacccggagcggtcgggcgtcgtgggccgcgtcctccggtccctcgcgtcggccggctcgccgctggtcctcaagtcgtcaggcccgtcggaggccagcgacgccagggccgacgccgcgtacgccgccatgcgcgcgctgggggtctccggcgtccccgtcatcgcggcggacctcgcggccgccgccgccgacgtcgtgccgtactactactacggctacggctacgccgacggtcacagccacccgggcgtgcagcggcgggtcgctggcgacgggcacgttctgcgtggcgctgcaaaacgcggacccggcggcgctgcaggccgggctca

SEQ ID NO: 9091 - DNA, 591 bp, Zea mays
gctggtacccctgttcgcacagcaaactctgccagggcagcacttatcttggtcctgaccaggggaggaactactgctaggcttgtagccaagtataggccatccatgccgattctgtccgttgtggttcctgagctgaagacagactcgttcgactgggcctgcagtgacgagggtccggcaaggcacagcctcattgtgaggggtgtcatcccaatgctgagtgccgccactgccaaggcctttgacaacgaagccactgacgaagctattggttttgccattgaaaatgcgaagacgatggggctatgcaacaccgatcaatccgttgtggccttgcaccgcatcgggatttcatccgtcatcaagctcctgactgtgaagtaggggtccaagggggagggacaccattttgcttggtgaatttttgtgaggctgcttacgcacatcagcgtatccacagcttttctgttgccaaagatacagactttgcgttctggtacaccttggtgttacaaggttgtgggaatttgtcgtttagatattagcgatttaaacagtttatcaactgctatagctaattaatttgca

SEQ ID NO: 9092 - DNA, 619 bp, Zea mays
tgttgagtagacgttggcaagcatgacataagctgagtcatccttgggattaatctccagaagcctctgtcccatggattctgccatgtcaaccctgcggtgaaccacacagcccattagaagtgtccgccacactgctgcatctggtttgcatggcattgtacaagcaaaactctctgcatcctctagatgccccacccgtgccattgcacccaccacgcaagtataatgctcaaggtcaggcttcacaccgtacttcgactgcattgcttccaaccaaaacttggcttcagtggctgctccggcattactacatgacgtgagaacagcaaggaatgttagcccatcaggggcaaaacccagctccatcatctggttaaacagtccagtgacctcctgcacatctccctgctgagcatgagcagaaagcaccgcgttccatgtaatcaggtttcggtcaccacccaacccctcaaaaaccttgactgcatcatccacatctccagccttaccataagcatccaccagggcggtcccaacagccacatttccatcaagcccaactaccaccgcatgggcgtgaatcccacaagtctgctccagcacagcaagccctgca

SEQ ID NO: 9093 - DNA, 583 bp, Zea mays
tggagagaatcgattcgattccccgtctgccgctgtcctttggctctggctcgctcattcgttcgctcgtcctaattgtctccaccacttttttttttctgcccggccactgccagtccaccacaaccacgtcccgccgtcgtcgtcgcgcttcccccacgcgcgccccgtcgcgtcccggtgctgctgttgagtgcgcccgcgcccgcgcgttgccgtgaagctgcttccgcgcgccgccgccgccgcctgcctgcgtgggttgcaagtcaagcggcaggcggggggacgggcgccggagggagcggacgacccgagaggaagcaggagaatgcaggacaagggcagccgcggcacgcgcttgagcggcacaagcgaagcaggctgcgtttagttcgtgcggtggactgcggccggggatcgctcgcttcggaggaggatgtcgcagacaggggaggtgcaggtgccactgttgcagaccgaggaggcggatggcgagtggagctccaagccacgccgcattgctctcttcgtcgagccgtcgccctttgcgttagtctcagccttctccccccagacatca

SEQ ID NO: 9094 - DNA, 815 bp, Zea mays
tgcgacttcggcggcgcagccaccgtctccaccaccgacccgagtacaaacgattcctccaccaccgacacgagtataatttcttaatggtaacggcagccatctcgttgttctgaaacattgcctgtcctgtccacacttgatgcaggtttctccgggtgcactttcgcttccagtgccaccaggtacacactactactactactgcgttattagtcttggagaatacggacgggtgaatgacgtggagatggttgcaaattgcaatgcatgcagcgccggtgctgggactggaaccgggacggcgggcagcagcaccttcagccccagcgcgggcaccggcttcaacggcaccgggaacgggatgggcggcagcactactaccggcctgggacccacgggcaacgcctttgacgccgccgccgccgccgcgccgggcctgctccccagcgccgcatccctcggcctcgcactcgccgtcctctccttcctaacctagccctgccgcgccattaacggcagcctcccctcgtcttatgtctggtcgtgttcagtaccataccatacctctctgaacatgagccagtgcagggctaggaataatgctcatatacgcagatccgtgcagttatattgacaagctaattataactgggatgagggtctaataaactgaaaaacaaaaccgtgactagagcgagagcgagagcgagagagagtacattgaaggtatgctccacagtagcagcttgagcgaggactgcagcggaacacaaaactagcagtaggatcatccaagagcgcggcatgcttga

SEQ ID NO: 9095 - DNA, 510 bp, Zea mays
tgacttgtgcgcttggatttaggtggaagcaaagaaggctgttcccagggacgaccacagtattgtgagcaagagcaacggcagcagcacagggtcacctggaccaggacgcaccaggaagatctttgttggaggcctgccctcgagcgtcacagaggctgacttcagaaggtatttcgagcagtttggcatcatcaccgatgtggtcgtgatgtacgaccacaacacgcagaggccaaggggctttgggttcatcacttacgattcagaagacgccgtggacaaaaccctgcacaagagcttccatgagctcaatggtaaaatggttgaggtcaagagggcagttccaaaggagcagtctcctggacctattgcacgttcacctgtgggagtggggcagaactatgctatgagcagggttcatagctttctaaatggttttaaccagggttacaatccaaaccccataggaggttatggcatgcgggtggatgcaaggtatggcttgct

SEQ ID NO: 9096 - DNA, 564 bp, Zea mays
tctgcatcagttgcaaaggccttctttgacgaaattgtcaaacttcatggtctgccatgctcgatagtcagtgatcgggacacagttttcactagccagttctggactgaactgtttaccatggctagagtgaagttacagatgagctcgacattccacccacaatccgatggtcagtcagaagttgttaacagaataatcatcatgtatcttcgctgtctagccggggaccgtcctaaatcatggctgaaatggttaccatgggcagaattttgctataatacatcatatcaatcggtactgaaatgttttccattcaaggttgtctacgggtgggatcctcctccgatggtctcctatcaagcaggggactcaaaggtggttgcgattgacgcccagttgcaggacagtgatgaatttcttgctgaaatcaaggatcgactagtgcaagcccaagtaactatgaagagttatcaggataaacgacatcgagaggtggaattcaacattggtgattgggtatggttatgattgcaacaaaggactgctgtgggcgtcacctca

SEQ ID NO: 9097 - DNA, 610 bp, Zea mays
tgcggcgcggtctcgctaaccctagacaccagcgcagacccgccgctcggcgcctgccggttcatcgacgacgacgcgctcgatcggggactcgccgccgtcgccgctagcttccccaacctcagccgcctctcggccaccgccgcctctgagtccggcgggctcatggccatcgctgtcggatgcccgacgcttcaggagctcgagctccaccgctgcaccgacctcgccctccgcccggtttccgccttcgcgcacctccagatcctccgcattgtcgccgcgtcccccgcgctctacggcaccgctgagggcggcggcgtcactgacatcggcctcaccatcctggcccatggatgcaagcggctggtcaagctggagcttcagggttgcgaggggagctacgacggcatcgcggctgtggggcgctgctgtgcgatgcttgaggagctcaccatcgctgaccacaggatggacggtgggtggcttgccgcgctagccttctgtgggaatctcaagaccctgcggctgcagagttgcagtaggatcgacgacgatcctggcccagcggaacaccttggtgcttgtctcacgctcgagagcctgcaga

SEQ ID NO: 9098 - DNA, 579 bp, Zea mays
gatgcctttgccaacatatttttccatgatgcctggacaattcagagagagatttcaaatgccacagatcatcaagatcctaattctgtttccagcagcatcgcaaaaggcgtgcatgagacgtttggcaagtactggaaagattgcaatgttgtgctagccattgctgttgtgatggatccccgtttcaagatgaagattgttgagttcagttactccaaaatctacggtccgacgaagggcgctaagtatgtcaagttggtggatggtgttgtacatgagctttacaaagagtatgttacactgacacttccgttgatgccaaaccatgttggggataagaacattccaagagatcctacttccattggcaatctacaatcaggcttcgaggtctccattgtcaagtcggagctagatcagtacttggaagaagccctggttccacgcatcttggagtttgacattctgaactggtggaagcttaatgccgtcaggtacccaacactctcgaggatggcccgagatgttcttgctataccggtgtccaccgttggtcgcggcagctctgtgttcgca

SEQ ID NO: 9099 - DNA, 1658 bp, Zea mays
cccgatgtcgcactcgaagcaattcctacgcacaggagtaaaagcgcctatgcacaggagtaaaagcacctacacacaaaatttgatgtatggttggattttgtacataactacatgtacaaaatttggttcactggttgactccttttttctctttatcaaatatattgttaggctaaacatcagatatcaggcatgcttgtatctaatatctatattgacctatctccctcaatcaacaactactaagctttccactaaattatatatttcagaggactgagtgattgacctatctctctcaagccgcaacccacaagcagataactatacaaggccttgcgcccctgcccctttaagccggcagcggccagcgtcttcctctcatccgcccgcggtccacggaggcgcagcgcactagcgcagtgcgcagcgcggcagaggcgagcgcaatgtaggcgcaggcgcgcagctgccacgccgccgccgaccttggccagggaggcgcaggcctgtgcgaggtcgacggggcgctcctcctcatggagctgatgcaggagcaggacccgccctcctccgacttgcttcttctagatggcgatggggatggcgatcgccggctgagccatgtcatccggtccctcgaggcagagatcggcggcggtgaggcggtggcgatggtcgccgacgacgatggcggtgtgagcatggacaggatcgaggatgcgctgtcgtcggacggcaccgatggctacgactacgaaggcgcatgcgcgtcgtcgtcgtcgttcgggtattggccgccgtcgtccttgttgttagccggtgggtatgatgacgcggagggttggtgcgtctacgctaatgggtatgagggtcctggcggtcatgttgtagggtacgatgactactgctgttgcgcagaaggttctgctgagctcatgtatctcccgctgtgggaatgaatatatatatatactacttcagtgtaggtgtttacggtgcacggttctgcccttctaccctccgacatccccctctactccgctcccatcgcaccctcctcactctcccagttctcccacctcgccatggcttggacgtcctaaggagttgctggcccgtatgaagcgtgttccgtaatcatctcaggtcagtggagctcacaccatttactgcttgacctctagcactattggttgtgtggaagtaggtgtgaaatttgctcaaacacaggctgtcaggtttatggatcccagacttagtgcataaggttgtaactaggttttagtgtgttgagcctaactttggagctatgttgcgcctagtctatttggttgtgggccaaagttctgtagcaagtttgaagaccatagtaagatgaacaagattagtaaagagagatgggctaggtgctgcataaaattgggagtataacatgtccatatcttctctgtcagtcttctgtgatttttttttagatttgtgaatagtatgtgaattcaggttttttagtgcagttttgagaatgtgttctgcctattgtaggcagttttgatccatgatttatataaagaagttcgagcccatgttataaggcacgcatgcctttaagtaagttaggtttgaatccgcataaagtagggaatatcgagggt

SEQ ID NO: 9100 - DNA, 572 bp, Zea mays
gaggatccctttgctgcaatggctagtgccacatgtacagtatttgtactcctcgttgttggattggttctgagaagtcgaaaaagctgttcatgcagccccaagagcacctctaaccatgccaagactttaccagccaatatggaaacaggtacacatgggactttaaattattcaagcataaaaatttcatgcattcgtaccgatagctagacttctattttattttcattacaaatctaggattccaactgtaaatctaggactcatcataaaacctgaactgtttgttattttcaaggcacatttgttaaatgtatccatgtactgatgtctgcttttcattatttgatgctgtgttccttatttacaggagactaagattatttcacatcaaaactcatattttccattttacagtccctacagcgaatgaggtcttgtactcttggagttctctattgattggcagtgatacttcctctagtaatggcattacatctgaaagagttcccaaaataaaaagttggttcaaggcatctaaaaaacttctaactgcaaaacagtttcca

SEQ ID NO: 9101 - DNA, 629 bp, Zea mays
tgcaattctacacacactcaagggaatctagttgaaagtagcagcagggcactgcctgaagtcaccaacagaaacattgaactaacttctccgtcagcaacacaagccagtcatttagctgttacacctatgaatgtctagcgccaatacatcatcatccattgaggtcatcatttgaagatcccagtggccgtcttcttaaggatgtctcggatctaaaagaaaaacgaacaagaaagccgaagacaattactagtgtcaagtggtatatataactttggccagagatgcatgcccttcgccttatcggataaaacaaagattacctgctttgacgagaggccaatgtttcccaaatcttcaagctggacaagcaaattggattagaaggccatttcagacatttgaattttttttccttttttttcttttggaaaaaagatctggatcattttgctttctgcaaatatcttacagttttgaatggttttggtgagtcctcccgtaattccagaatatattctgctctcctcgcgccaattccctaacaaacaagaggggaagttactcagaaaaaaaggctggaacaatagtgatcgaaatgctattaagatgaaaaggatcgtact

SEQ ID NO: 9102 - DNA, 619 bp, Zea mays
tggccaagtgtcttcatctccgatgcgaactgtgattcggaatgttgcgagtcctgtagccttttcacggctaggaaggagccgtcaggtagcaccgccctgtacatagtccctgtcctcccagtaccaatgatgttctctttactgaactcgtctgtggctttcatgagatcactcagtttcatctttgaaactggattctcaaacatagatacctggataataatagaaatgatcattatgtcagcgagaagttcctggttactttttgtgagaaaggttacttagaaaaaaagaaaataaaaattcaaatgataagttaacaacttgccttgatagtttttgttcctttgatactcttcgcccacttattatcatcctcatcctttgccgccttcttggccggtaccctccgcagacaaaagaacacaactattgcaccgataatgacgacgactaccacgccaacaacagccccgatgattgatgcagtgctcttgctcttcgctgaggcttggcattcacctaatggaggcccacacagtccgtcattaccagcgaagtttgatgccgggaatttctgtagagagcttgggatagtccctccagggtaccagaa

SEQ ID NO: 9103 - DNA, 570 bp, Zea mays
tgcatttgccattgctcgtgcaagcaccacagaagaagccgctgaatttgcagcctacccagccactgatgcatcaggctgacttgtcgtaggtggaactggggaactcggtcacgctagagctatccggaggattcagcaccagcgaggtattgttgtcttatgtcaccatccaatccaggaaggtccccaagctgggatgctccttggctcacagtgaccccacttgcagtctgctgataatatttcaagacgccgaggtcactcatcttgaacaccttctgcatctccaccttgaactttgtgagctcctcccgatcgctacctcactacagtaaacgaggaaatttccgacggctaaaaccgtcggacataagatttagaccgtcggagataagctatgtctgacggcattaacttatctccgacggttttaagccgtcgtggataacgcgtcggaaatagcattatgttcgacggctgccgtcggacatacgctatgtccgacggtcccatcgaaccgtcggagataaggtggcgtaactgttttacccgccgcctgggcccaca

SEQ ID NO: 9104 - DNA, 527 bp, Zea mays
tggtgcggtgcggccctcgcctctcctccagtcctctcggcccttttgtttccttttttcttccctggctctcgtacgtgcttgctggagcgcgcttgatccggtttccttgcgcgccgttctcgttcctggcttccggccttggctggcctcctccccgcggaactgaggcgaattggcgcgggagggcacgggatcttgccgtcctgtcctggcgtctcctgccgcaccgcgtttgggcaacttttttttgtcggcgaaaaaagaatacatgaaaacgccgccttttgctcggggcgcttcacgggcctccgtgcgttttgaaaattctcttccgttccacctacactctttttcctcagctcgatctgcactctcgttttttttacttccgtttcgattgccccttcgccgctccgttctttgatttaataaagtgcgagtcctttatctctctttaactttggtttttgttctctctatcaggcagcattagccatggtttagcggaggcgattctcgttgca

SEQ ID NO: 9105 - DNA, 536 bp, Zea mays
tgtggggatgccatcagtgcctgccatggatgcggcattaatactcggaagagaaatggagaagcaccagataatatctaaattaacagaaaccagtgaccaacaaaaaaccatgataatatccattgttggacttggtggatctggcaaaactaccttggctaaacttgttttcaatgatggtaacactatagcgaagcattttaaagttagactatgggttcatgtgtcacaagagtttgattttgaaagtattgttgggaagctgtttgaagctattgcccatggcaagtctgaaagccataacttgcagcatatggtcaaaataatatcagacgaattgactgaaaagatgttcttgcttgtactggatgatgtttggactaaggaccgaattgagttggaacaaataatggtacttatgaggagcggtggatctgaaagcaggattttactgactactcgcaatagcgatgttgctgaagcagtggaatctgcatatctatgtaagctgccactcttgtctttggctgaca

SEQ ID NO: 9106 - DNA, 623 bp, Zea mays
tgctgcactcggagcatgaggccgtgccctcgcgcggacgtgctcatcacctcgtcgtacaggccgtgaaacacctgtgcagcaaacctgcaagccgtgcaacaatgaggtgaggtgagttttcagttgtcttcctgttgcgatttctgttctgtttcctactccagttttctttgctccaatattcgggtatcagaaactaattaatcggagcgttcttgcatagatgaagataagaaaggcttttggaatttggtctttttttttccttctctccccctagaaagggcagcagctatttcgattcacaattacgcacttattatgatcggaaaaatattatgacagcacatttatctccccgctgcagagctcagagtcctagcacaaggccatcacagagttaatgacctggaaagtcaaatgtctaatgcatcaatcgcctaccttttctaaaaaaaaagggaggaagggttccaaaacatagcatatagcaaaaaaaaaagcattaggtgatccactacgaccgaaatccaaattaaacgcgatcggtccaggaaccatgacgcacgcagcgattcgaaatgcgtggcatcaacaggggtacgagcagagttcgttca

SEQ ID NO: 9107 - DNA, 607 bp, Zea mays
tgacgagctgagcaggcaggcggtagtggccgagcgaaagcatcctcgatctcgtcgtatcgtagctgccgccgctcagagcaatggagagagcggtgccagttcggaagtcgcacaccaacacggccgaccttctctcctggtcggccacgggccctgacgcatctgcctcgccggccgcgtcctcccgccccagcctcaaggtttgttgtcgccctattgatacccgtgtcggtgtgttgtgaattgattgttaatctgtttctgcgctatgcggctgacttgggggtgatggtgtgtgagcagccggccgcggggattacgccggcgatgttcggcgcgccggtcaccgagcaggaggccgaggatctgagcaagaggtgagatctgaggcatcccttttccgcattccgtgctcatccgttagttgttagttcgattccgatctgatctagcgatgcgtatctatgtgtgcgtgcgtgcgtgctttgttcggatgtatgctcctgccgatccagtcgatttctcatttcaaacgtagcaagcttggttgctctggttttgacgagaaacgctagagcggatggggtttagtgaggagtggcag

SEQ ID NO: 9108 - DNA, 647 bp, Zea mays
tgcattatctggctcactgatctcgtttgtactagcagaaatcacttctgctgtagcattagcaaagcatttccgagtttcaacttgagatttccctgtgggtggtagagcagctcccttaacacccaggattctgatagttgatttcctaattgaaggtgcatctgaagggcctttgcatatttgcagcttctttgtgggagatggcatgacggccccatctgactgatcgcccaggctcacattatcttcatttctgtactttttgtctgcaataagataaaataattaagggttaagattcagtgcatggctactaaaattacgttgataaaagcatcaagtaaacaccactgggaacacttgagttggcttttgaagctgaattgttgattgaatctttgacagctctggaggaagtaactctggaacgcttagcagtagggttgattgtaaggtttgcacatttcctctcttcgttcagagcaacaggttgagtaagaggcttccaaccagatgaagtcacttttagaggggtccgggtacgagtggcagtcagtcgtgaggcaactaattgagcgctaaaagaagcatatgaaatacttctttgtgtgcttgcgctatcagatcctcctgccttgaaacca

SEQ ID NO: 9109 - DNA, 550 bp, Zea mays
tgcaactattagaacctataagcatgagtaagcaagatatgtgtataggttaaaaatggtccatgaacttgaaagactgagtttgttctacattatgtcagtatttgtactttcatttgtttgaacatagatcctaattgtgattaaatctaacgattattatgatttgatgggctttagttatttaatagagatctagaaggttgtgaactctttgtagtttaatttatcatctatggctcagtatcttttccttttttgtagaaggtatggaaaatgctgttccatgtatctttgagattacatgaccatttgagcctgtctcattgcagatgtattcctcacttcagaaaattacagctctacctgatgatacaaaagtatactgtgggcatgaatataccttggtgagtaattttctatttcatttccagtctcctgcatcgatctgttatttaatgcctgatgttcctctatgcagagtaatgcaaagtttgccttgagtgtagaaccgggaaataaagcattgcaggaatatgctgcaaatgca

SEQ ID NO: 9110 - DNA, 568 bp, Zea mays
tgcttggtgctgcggctgttgtgctgctgcggtgccatactcgccatgatggtgatgtgctggcggtggcggctgcgatgaagcggcgcctgtgagttgctgtacgactgcacggaactggtcgggccggacgacgtggaccgccgtgtccgcggggtcccggcgtctccagtgcggcctggcggcgggcttgctgcaggaagctgcgtccacggcctgctgctgctgctgcttgttcttgctgctgttctccattaactactcgaccaggaggagctggtggcacgtggagcttatagtatatatatagctgttcagagctgatgagagatcgtctggtgggatgcggcgatagcgcgcggctatttatagttaagcaacggcggcggcgaagagaactagagaagtcatgccagcttggtgctgacatcactgcttttgctcggagcctcggacgagagtccagtgcacccacctccagcagcaacaggcaaccgcaaaacggagtcaaaccaaaagcgtgggtggtcaaataaataatcctgcagcttcaggtaggtccggacca

SEQ ID NO: 9111 - DNA, 544 bp, Zea mays
tgagcctcttcaggtaactcaagcttgtacgcaactggcccaatccgagcaagcactttgtagggtccaaagaatttgaaggctagcttaggacaaggcctattcaccacagtcttctgagcataaggttgaagtttaagcagtaccaattccccaacctgaaattcccgtggaatacgccccttgtctgccaattgtttcattctgttctgtgctcgagctaggtgttccttgagaaaacctgagaattcagccctggtttccaggaactcttgcacagaaatgtccccacccgtgctggaagacggaatagccaacataggagcatcataaccataaagggccttgaaaggagtgcaacccaaagctgaatggacagaagtattataccacagttctgccagagctagccatgatttccacttggatggttgagagtggacagcacatctgagatacatctcaacacattggttcaatctctcactttgtccatccgtttgggggtggtatgccgtggacatgagcagcttaacatctaaca

SEQ ID NO: 9112 - DNA, 497 bp, Zea mays
attgcaattacaatcaatacagagggtctaggatctgaatggtgagttggggatagttcaataccaaggaattgggatccaattttgactctaaattcattagacaaccaaatagcagaattcagaaatcctgatttcaattctcaattccggacttcaatatctacatccaaacgggctgtcaagtaaaacttaggaccaacagtgacatttatttaatcatttttacttcactgggaataggacctaacattgtttctatacatatctgtgtaaaagacacttctctagttaaagaagtggaaagcgcaaataagagttaaaagttgtgtacctttgcaccatcgtctttggattctatcaataatatagtaccataacatgtgtcacagaaacccttgctccctctaacgccaaagaatttgccttgtttgacgcaccctttgcagacagagtacgtacaagtataacacatgtattgtactgccttttcgcag

SEQ ID NO: 9113 - DNA, 569 bp, Zea mays
tgccgtatctgagttcccatcggcaatttgcgcaatcaaaatacactgtagcacatccagtagactgtgtatgtgactacacatcatccgcgctcccttccttcgtgccacatattcacacgttctctctcctgctcgcattctgctggagcaccgcttcattttacgagacgtgaatggttcggcctaatattgagtaactccatacatattgcaacaaattacacacggctgcacatattgcatatttttagatatacatcattagtaatattaacttattaatacagagaaagggccatattttcaattcatattatgaatttatctgcagtctttaaccagtttttgttaaccgtcatgcacaataaaatcttagtaagaaaatgacttaaccaaagaaaatgtgcagtgtgaaatataactacagcaaacctgctgcccaatgttgtatgttggaagtaacgttccaccccatgagtcaaagcggtaaacatccagataatttttctacaagaagaaaacatttctttgaaagaagaacaatcgccagatccaggggtaccgag

SEQ ID NO: 9114 - DNA, 563 bp, Zea mays
tgaaattaagaccagagtggaacctagcacttttgacgtcgttttcttgaaattcacaaaaagggcagtcaggggacgggaagaatgcaacttttatcagtgaataagaaaagcatccgtgctttacagttatgacttgggagtggggctaccatagtttgtacagagctactccctcccaaaattgaggataattttgacttttagatatcatgtttgatcatttttaatcagtttttaaaaaaacaataaaattaatgtcactattaaagtatctttagtgaaaaaataattcaaaacaaaataaaaattacttatataaaaaaataactaagacggatagttaaacaaatatctaacagtaaaaaacgtcatgtatttttaggacagggactgtaaacaggagaacgacatcacggaacgtcagggtttcctcacatgacagcttcccgttactacctcattcattccatgtgcagaaagtcaaacaaattgtgaaaccaagaacgaaatctgaagtcacgcggggatattaaaagttaaacattgtgcactgtagcagc

SEQ ID NO: 9115 - DNA, 591 bp, Zea mays
tgcagagctcccatcatcctcttcctagcttcctctactagaccgctacgacaccgcacggcagacggcgccgcacctcaagcgagcgaccgtgctctcactctcgcctcccccaacatcccgttcggcgcatccagactcagttcaccccccaaccaagccaagaacccaacgatagatgcatgcacctgcagctccccgctcatgctggcaaatccttcttgttcctgcgccgtactaccgcatgtatgtacagtacaggcggcggggtgaccgaaggcgcgcagaggacgaagacaacgtggcacgcgcggcggtgtgggatctcgagggcagacgagggggggagggaggaccggaggaggaagcagaggcacactcggctctgtcgctaggcttttaaatagcaaatgtatgtcccgggtagggtagggtcgtgatggggcgcggtggcggccgcaagcgagatggcgacgaggagaccgaagaagaggaaggtttggctgggaccggaccgaagaagatggtgacgataaggcggtcggctcacggcgtggaatccctgagccggccccggcgggacctcgtgca

SEQ ID NO: 9116 - DNA, 768 bp, Zea mays
agaggagggaagccaacgaggccgtcgccaaggggcaggctgcgcaggcggaggccaagctggcgcgggcggagggcaatcttgccaaggagctcgccgatcatctgcaagagcggctcaccgccctggagagccgcgcgaaggaggccgaggccgcgatgcatgcggaggccgaacggacgcgcacgcagcttatggatacatatcgtgagctgggcgcgcggaccggtgacttcgaggtgccggaccgagagcccgggcttcgctgtctgcagtgggtgcaggaggagttgcaggcactccccactatcgtggaggggtttatgtcgtatgcatccctggtcacctgcgagggggcgatgaacgcgctctcccgcgaagggtgccggcactttgaggtcttcgaccaagctgatgaagattttgagcgagatatctacaaggttgaggaccccgtagtgaaggaatccgccggagccctctacgaccggatgtggggccctcacggtcgcgaggtggtcagggagcgggccgagacggcgagggcgcaggtaacgtttggcttttgtttggtgtttgctggatgtgggctatgtgtgggtttgctgaattttgtgtgttttgtcttaggcggcatgtggcgagagcgtggacgacttcggggcgttgaacagcatgctgtctgacccggagccgaccccggcggaggccgtatctggggtcgccctggagccgcccccggagactacggaagacgcgccgggtgcc

SEQ ID NO: 9117 - DNA, 595 bp, Zea mays
tgcctgattattaatgttatctgtaagaaaaaaacggacctaatcaatcgttctgtgccagaatcccggagttaatatgagctgcaaagtcacatctctgcccttgttctccaagttgttccctttccccatctgtaaaacagccgtagagctaacagattctgatgtgaagttttgagttttttttttttttttttgtcggaagattgtcagtctcgcctgcttcgaccatcaagccgtcatttgattttatttatttttttttttgaaagaaggaaaccctgcaggcaggccagtttcaccaaaaagtgggtaagaaaacacataagcgttcagtttacgaaatggcggggccgcggccgcttccaacagagccacgtacaataggactgactcccttttgtttggttcgacgacagcaaaaagctttatggaagtaccaaagcctgctgataattctcttttttttttccatctgactgctgctgcactgtgcatcaccaccagaggcgtggactgatggaccaagaccaacacccacccttagctaagcttagcttagcttagcttagctagcttgccatgccatgctgca

SEQ ID NO: 9118 - DNA, 620 bp, Zea mays
tggggataggaacctctgttacacatatgctggtaccaaatctttcccttcttatttcatatgttttcttccacattgtctattatcagaactttggcatggatcttcctagccaatggaagaaaagccatgtctaagtaattgaaagctgcatgcattaacatttaactgggggacaaatgggagcaatcacatctcctatttcatgtaacgaaaaccaatttaccataagattatcatgcatctcagcaaaatgtatattttgtattgcctcgaggacaaaaattcccttggaagtagatgatattattttactagcacttttcagagtcaagtttagccatctacatctgttgctagatacatcaggcttaagaagcaaagcagggattactggtcattcacaacatttattgacattttattctatataacttcaattagctttggttttcctatcgatgctttgaatgaatttgatgttctttttataaacttggaccttatgaatcttattattccacatactgtgtccttccattatctactattctactatatataatttgttttttcccttttcatgtaggagcctgttgaaatttctggatttcacgaaa

SEQ ID NO: 9119 - DNA, 852 bp, Zea mays
tctagaggatccccctgcgagtcagggtggtgctctacaagcaactcagtttgctggaccaagggttatgcagccacagccttctaacttgggaattacgcaacagcagccttctagtaccggtttcatgcatccgccacaggttggagctccagcagcttcattacaagctcaagcacctggaatcaatcaaggtttggtcagtggaggcagcatgggaggatctgtcggttggcaaggttggcaaggcggtaatgctgcctcagtgggaggcattccacaagctataccaggagctgctccttcacaggcagcacaaggtggatttggcccaggtttacctagaacaataggtgtggcgcctggtacaacaggtacaagcaatgtctccatcgccattgcctccgcagagcaacagtgccggtttgcctcagaattcaaaagctttggtaatgtctggaaatggccctgccatcagttctggatcaagcacagacatcttctctgcacttacacagccaaagccaagcatatctgcacctgcacctcagacgagctcgattccgagttcatccagttttatggccacgcctactggctcccagaacctgactaatctcactcagtttggttctttgcaaggtagcagccaacctcaacagactcagcctatcgtaaagcccattcctgctccagctacacctgttgtctctgttgggatttctaattcagcttctcaatggcccagaattactcaaccggacatccaaaagtacatgaaagtctttggggatgttgatagggacagagatggcaaaataactggtgcagaagctcgcactctgttcctca

SEQ ID NO: 9120 - DNA, 1543 bp, Zea mays
ccgcaagcgcgcccgcgcgcgcgcccgcgcgcgcgcccgcgcgccgggtgggccaaaattccccccccccctcggcccaactagctggaaaaacctttctctttttcttttctcttttctttttcccattttcacatatatatttagatgctaatattttatgcaccaaaaatagtctaaataaattatagggcacaaaaataataaagtataagaacttgcacaccccacaaaggtcactatgtttgatgtattgttattatctgtgtttgattagcggaagagggatccgatcctccggaacttatagctccggaagaagggcaagaacccgacccctccgagataaacctcttgtgccaggaaagcttcgacgaaggcaagtccatccttcccttgatgcattatttacctatttctctctaccactgcctaagcctggattatgggatgggaatcgaattgcatggtgagcatgagagagcccgcattaactattactttgattaaaagatatggggcaagtaaaaaggggtataagtggcatgttttccaaaagtgtgcgatgaagggtattcaccctcatcacctagtgagtaggatgatcagggactccctggtttaggggagggcctaaggtgttggctctgtttcagtatttagcttgatcattatgttcgaattttggtttgacttgatccttattttcaaattttagctaatatggttcagcgttaacacagtgctgggtgatgatgcaggctttctgcaaacaaatttgattactattggttataactaacaaccattctcttctgtcgtgtagagtccttcagttagatgttcctgcggattctgaggcctgtcctaggagaattgtatcagggagtgttagcagccctattgcgaatggtgaaaagggtctcttacggaatcagaatgcacggttcactgcacttgcaagtcctgagaggagcgatattgaaaacaggcatgtacgctagtaacgctacttgagactggtgtgataggataggccttatattatgcatgcccatatgatctaagggctctcctcaacagaacaatatgtgagtgtgtaatctccaatacttgtaatatctgcttgcacacagactgcatcatatcacagtttctggagtgaacactgtatccatataatggtaatatactggaaataactgatcacagtacatgcaacatgttctatcttattggatgagagcttagatacgtggatcctggtagcaggagctcgaattggcaattccaagcgtcgatagctggctcgcctgtgttacaatctgttatgacgttggacaatccctagacatacactccaagtccgaaatgccatagacgtgtaaaatgccttgtgtttgcctagatgagcttaaactaaccataacagttaatttgcctatgcgcctctattgccccaatatttccagtatgctataactttgcactagccctcctgaattcaatataattttcccccaccccaggtgtagcggcggtt

SEQ ID NO: 9121 - DNA, 577 bp, Zea mays
tgatttttggatactataatgtaatctaggaggtttgagtctaagaaacctgtagaaacttagtagaccttggactaatgagcaagttctattaatagtgactaatctgttcttaatcaaaattaagagaaaaggctaattgaagtcgggtggattagtaaagagatgtagattcaaaattacagaaatatctacctttgatcttttcatcccttgccgtgtcctactttggtatgggagatggtagaaataatttgagggcagagatattcagaatcatgcacatcactgaaatatcaccagtagaaatatctactacagtgccctcctatccttaccccctccatttgccatggataaacttcaccttgcatgattggtgaagctcaccaagaagtccgtttgatcattacggtcatgtttggtcggaacatgagtttgacgccgcatgacctgcactggtgttgacccacccaaaactcagttggtccgatgtcaattcctgtaagcattgcgttgctcgtgtcttgctcatgctccctatgcccttaatttgaatcatccggtacttaaatca

SEQ ID NO: 9122 - DNA, 594 bp, Zea mays
gacgactctagaggatccccctggcgcgagttttaaatttccaatgaccgcctgattccaaatccctggactggacccatccaattttgtatacataaatgcgcttacgtcacagggaccactgagtgctagtacttgctagcacgtgacacgggcaggcatctcgcgctcctgcggccctgccgcatcgcatctccaattctccaaaaatctgcccaagaattatttccaataacaaaacccaccgtaaaaaaatagccgagcctcgcgtccgtggctccgagaccgagctgcgatcaggaaacggacgcgcgcgcgagcaggtggcgccgcggtgcgatctaaaccagactgccggaccccgacatgggtttgcattgcatgcgcaggattcgccgcgcccgtgacgcgcgtgggcgtggcggacgtacggccccgcaccaccgccgccgctgaccgctggcgccgtgacacaagccacgctctcaactggacgcgtgctgctgctgctggtggtcgtacacgtgagttggttcgggccaggcgcacggtgcggccgtcgcgacgtgcaccatgcaccgtgggccagcacca

SEQ ID NO: 9123 - DNA, 634 bp, Zea mays
tgctagttaacagaataaatgtgttaggtcagtttgagtgctgctaatattctattgtgttttacaaggtgttagatgaatcatattaggaaattgctgctgaatacttagaattgactggttatgtagagcgcgtcacttgctgaaagagctcgtgttgcgtataatttggccatactttaggaagtgtacaagaccatgtttctatttgatactctatgctgggattttatatgcattgcaggcacacaggcagattagctgtccatggagaagctggagataaagcttccctttatagggataggtatcaagtgctgctgcagagactgtctcgtgataaatatttctctaagccggcttttgacacagttgcgaccgaacactgtagttgcgaggtatttctccctgctatgtgttatctatctattacatattgatttctttgttccttatgacttaaatcgaatcctgcaaatagtattcattacacattcgttttcaattcgttgtatgtttgttaatctttttatgtggagttggttatatgtttttttttcttcattcagataacttctgtacagtcgctaattgggtgcactgggcggagatggattatgggggtcatttcgca

SEQ ID NO: 9124 - DNA, 597 bp, Zea mays
cattatattcaaggcatcattcgacacttgccttcatatgccggtaaattcgatcctcatgcatacattgattgggagctaaaggtagataaggaatttgataagcatgatctatctcaaaaacaaaagatttatattgcctctaatttgttaactgagcacgcattgatggaatggaaatacatttgtaggcacaacaaagttccacaatcttgggaagacttcaaacttcattttagagatgcattcattcctgcatactattctgatcatttgctttctaaattagacaccttaaagcagggtgctaggactgtgaaagattattattatgattttaaaatttgtaccatgtttgctcgtttagatgaatgcatggaagatgtaatgactaggttcatgaaatgactcaattctgaaactcagactatagtcatgcatgaagcatacaaacacatttctcacttgtttttgcttgcatgtaaagctgaaaatgagattctattatacaattatacaagcactgaacatgtgagccatagttcctcttttgcatctgctctacatgctgatcaagaacacaaaataatgaaacca

SEQ ID NO: 9125 - DNA, 594 bp, Zea mays
tgcgacttcggcggtgccgcggtccttaccaccaccaacccgagtaagctcgtcaagctccaccctgaacacgtcgagatcagagcaaggttcttgttttcgcaatctgcatagatatatagatagatgttcacgcgttcgcttctttgtttgcatctgcatgcgcaggtacttcgacgtgccagtatccagcaacgaggtaaatttctaccaacgcaagccaaaaaaaaaaaaggaaacgtagctagctacatgtggtgatttctgcttggaactgacagcaccggagcttcagtcctgaacacgtcgactccgctgacgccaggatacgggtctggccccggcgggtacgggagctctccaccggctggagacggcaggtcccctccgctgtacgggaacatgtcgccgccggactacggcgacaacaccagcgccgccgtgaccgtgagggcactgcccggccgcaagacggcggcggccgtcgtggcgctggccacgacgtcgacgtggctcctcatcgcactgacggtgagcggctgaacctgcacgccaggcccgcgcgccgcgttgcctccgcgcacgtgcagttcg

SEQ ID NO: 9126 - DNA, 658 bp, Zea mays
tgcgaacggcaccagcgccgcgatgaggcagatcgccacgacgctccacgccgccagcctgaaccgcaagtgcttccgtgccgcccgaccgccgtcgccagccggcctcacgaccggactgctgcttccatacgctggagcaccggacgacggcagcccctcctggtcccggcagtcggcgttcacaacctcgccacagagcctgaggttgtggtcgaacgcgctcgcggggaaccgtcgcaacgcgcgggtgccggggacctcgccctggaggaagttgtaggacacgttgaagacgacgagcccgtgctgctcgaacgccggaagggtgccgttgagcaggttgtcctggagttcgagccgcgcgagctcccatagcgatgtggcataaccgcgcgggatgggccccgagaaccggttgctggacagatcaacggcgcggagccgcgacagcccatcgagccccgggagcgcgccgtggagcgcgttcccgcgcagggacagcgcctccagccgcgacacgccccggagcgcgctccgcgggagcgtgcccgtaagctgcgcgccgtcgagcgacacgccgaccacgcgcccgtcgccgttacacgacacgccgtgccaccggctccgatcgccgtggcacgggggccccgtccag

SEQ ID NO: 9127 - DNA, 653 bp, Zea mays
tgtgaagggatcatcaagatcagagaggtcatgttgttggtgtccgagagcttgaaggttcagagtgaactccctttccacagccgacccaaacaaggattcatataactccagggctgtttgctgttttccctcctgagaagtgaccaattgattaaccaccttgaacttggcgataaaattctggctgaaacaaatgttaactttgattctataagagcatggcagcttgtaacatggatgacagaaatctggaaaatctatggtaggacgtgattctgaattgaactagaggaatctataggttttcaagaatctattctgctgttgtacccgtttagttgagattccatatttttggcagcgaatctgatttagaaagttgaaccaaacacacccttattcttgcccgactttcatcaactagcactacatcgtttgcaaaaagcacactagaataatcatagtgacaaatatgttaagtactttgtcattttaggaactaggcttagattgcattgagtatgcattgtagaatgctcgttaactacttgattgctttcttgaaccatttaaaattttcattatcagtagatactattgctttaggagctattgtaaactgagtattcatcaggcagatatatgttaca

SEQ ID NO: 9128 - DNA, 562 bp, Zea mays
tggaagcgcatagctcgtaacagaacagaagcctaggttaccgcccgtagcctgttgtagtaggcccagtatcctgttgtcgccatagaggttccttgtccatgttcacgccatgtcatcgtatggaatgtacaaatggcgagtgtagaaaaggaataaagtgtcatactcttcgcacggttgaaacacgaaacgatgccgtgaaggtttttgtcataatctgttgttggtttcaaaagtcctggcaataatctgttgtcatgaagatgagttcatggcttaagctgcgacacggagtttctgaacttgctgtgttccaaattttcagtctggttcttccggtccccttcggtctgtatgattgatggtttgctggtggtaccctgtagtgatacagaaccatgtggacgtgatgcagtttggagtcgacttccagaaatcttttctccgatctcctgcaagtgacaacctgacattgtagctttgattgcccgggttggaggttgctttccagtcgcagcgagtgggttgggcgtgctggtgccgctgaaggcgtggagca

SEQ ID NO: 9129 - DNA, 616 bp, Zea mays
tacccctgcccgctcaggccctgcaaacaatacccatcacctggccgtttgctgtgtggggtctggacctcgtcggccctttgtagaaggcacccgggggatacacacacctgctggtcgccatcgacaaattctccatgtggattgaggtccgacccctaaacagcatcagatccgagcaggcggtggcgttcttcaccaacatcatccatcgctttggggtcccgaactccatcatcaccgacaatggcacccagttcactggcaggaagttcctagacttctgcaaggaccaccacatccgggtggactgggctgccgtagctcaccccatgacgaatgggcaggtagagcgtgccaacggcatgattctgcagggactcaagccgaggatctacaatgacctcaacaggtttggcaggcgatggatgaaggaactcctctctgtggtctggagtctaaggacgacgccgagccgggccacgcgcttcacgccgttttttctagtctatggggccgagcctatcttgcccacagacttagaatacggttccccgaggacgagggcgtacgacgaacaaagcaaccaggccagccaagatgactcactggacca

SEQ ID NO: 9130 - DNA, 624 bp, Zea mays
tgctgggaccgttacatatgttaaaatcctgaatgattaaattccttgacttgatattattattcacatttgttcgattagcattagggataaaaacggtagaaaacgatcaaaaaacagctaatttggttttgataaactctatggtcaaaatacggaatctgaattatcggtttttcaaaaacgattgaaaacaataaactctagtcgaaatggaaaatacataatcaattgtcatttgtcctaacttttaagatattagaatacacaaagaatcattttatttagagtaattacaacttttgtttcctcttatttattcagttgaacacaacaaaagtatataacttacatagattatatgctagatgtgtctcctattatataaaaatggtatcatcgcaactccaaaataaaaaatgcgaaaacgatagaaaaactagctaaataatttccgtactgtttcttatcgatttccaagcaattcgtactagctagatggatccgcggcccaccctcgctggaaccgcgccacgggccaccagccccaccacatgggctgaactgctcccactgccgcatgggctggcctcagctcctcacgccaggggggtcctctggagt

SEQ ID NO: 9131 - DNA, 601 bp, Zea mays
tgccgacagcccgccactcgggcagcgacgacgacgatcacgggaacctccacctggttccggttccggacgaggaggaggccgatggcgagccggcgtccggcagcggcgtgaaccgcgtcggcccggagagcaagtcgtctgctttcgtgtcggacttcgaggcggccgccgcggcgctacgcgtgtcggaggaactcccttcttccaattaagcagtcagtaggttcttgtggatcggctgttcttctccggctgagcttgagcattcctccgaatttgttcttctccggctgttcttccaatgagcttgagactgatgcctcatatcattgcacgcaccaataatcatctcttcagaaaaaagatgaatcattgttttatttgttttattatatattcacccagttcttgatcgatccgatccatctttgctgctaacagcctgcatgcgtggtttgtgctcaagagcacctttttttttcgcctttccgacagaaataatcaaaccacccgaatccagaccagcaaggtcgaaattccaaccactggaactggaatatatgaaaccctccacttccgaaacacaagacacaacaca

SEQ ID NO: 9132 - DNA, 616 bp, Zea mays
tgagacaagttcttgagctcatccagaggccacccgctcctatcctgagcggcacgcgcctctttgctcgtcaccgtgaagcagcagagcgacgtgatgcttctcagatggcctactctgaatgcggcatcgtcgatcactgtgccggcaaggtcaaggtccctgagccctctcagatgctcaatcccttttggcagcgcgtgcagtgccctgcaccctctcagcaggaggaatttcaggttccacaggttgcctatggattctggaattgcctgaattctcgtgtgagacaggttcaggaacctcaggtaaacaagattgcccaggtcggcaggtcctctggaatgagctccactgctgtttcgctgaggtctaatactttaaggtgctgctgcaatcttgtaaagatgcttccttcaaccgtaagtgggttcttttgaagaagcagcgttcttaccctttctaacttgaggatcttctcaggtatcgaggccaggtttcttctcgcgagggaaacacgccgtggcgcgaacggggcatcgctgtcgaccaacagccgatacgagtcgccggtcaactcctcaccatgcgagagcaggggtaccagctagagtgt

SEQ ID NO: 9133 - DNA, 622 bp, Zea mays
atggtaccataatccatactgttggcagctacaaattcagcaaatgttgcagaatatctcttgaacccagtcatccaagtgatggattcctcatctatatcaatctcagttgtggccaggaattgctttactgccatctcactgaaatcagtcctctgacccataaagtgatgcagaccacatgtctcaaattttggaatcaggtcctccataactgattgtcccagcataaaagtccaatcaatcacttgatgtttgtgaaagttggtatccatcaatgtgccccaaaagacatcaaattggagctgagtgtggaagaattgaacatttgtgtctgatggcagagtataatgatttacagttctcctggagcagtattcagccatagagaacctcctctttgggtaagtccatcctgtgatgtcaattgggtagtcaggatgtgtatgaggaatgtcttctgtgtccatagagacactgcccccagctgaagattgggcctctgaatcagtggttggagtgtagtcagcatcgtctgcacgatggcactttgatttgaagcgaccggcaagcttcttgcaaagaccacccagaccactacaatagggtaccgagctcgaat

SEQ ID NO: 9134 - DNA, 613 bp, Zea mays
tgcacacgcatttttccgtcctcgcctagtcgcctgtcgttgtcttccggccggccgcagtgttggttcactcactgcatgtacatacagagtgacaatccatgcatgcatgcatgcagactgcgtttgctgttagtgccctgcaaattggcccaagtcaggagtcgtgtgcgcacgtggtcgtcgctgattccttatttactactagtactacctatagtactagttagtggtggtcaggtcagtataaataaaacccacgtagtaacggtcagtaagcatgtactcctagtatactagtattattcttgttctgcatgcaccaaccgccaggacccaggacccaccgacccaggagactacgactacgacttgtcagaggctgatgatccgatcgacatcccatccggtcgtccatgcatgtaacgcaggcgcttgactaatccagtacgtagtacgataattagttagcacacgaaacgtgcgtcgtcgtgcctataatattgtctaaccccttgaatgcgtgcaacacaccactgtaacgcacgttgcctgctaaccttgaattcgcacaagtcctcgctacacgttagctaaggtatctctctctcca

SEQ ID NO: 9135 - DNA, 635 bp, Zea mays
tctggatcctagctacaaatagaatgacacagaactattgtgtaatgaagtagaatgcatagaaacattcatagataaaagaaaactggaaatcaaacatgaacaatatacatacaaattcaagatcaattcgatcgatgaccaagaaagtcaaaaatacgaatacaggagcttgcgaaacctgacattgatggaacgcaagcagccgctagctttcccaaagcgacaaaaaaaataataactaaaaagccaacattttcgttcaaggatgagaggcaataataaaccaaacagttccgaacttgggtttctttctagcgaatttcaaaccgttggcacgagtttggtcctatactgaaacaagagcagcaaaagttttatacgtgtatggggtcccatttctatacgcaggacaccgaaatggaaactgaaaaaaaaaaagagcaatatctgtatttttttcgtgtaagcttgggaaaacaatcacgtcacagaaagtttcccagggaactatggtccccatgcatgccaagcagcacatatcgacggtaaggcaggcaagaacaaggcaatctatcgaatgcaaaatcatgaaactagtggcgcatgcgcatctgatagatgcaccgtgagca

SEQ ID NO: 9136 - DNA, 633 bp, Zea mays
actaggcagtggcaccggagtcatgaatccagcgccatttgcgtttggatggtggatgctggtcctcctattgaagctgcttgtctttctaggactaggtttggacccgaaaatcaactccttctccttaagcaataaactgtgcagcttcctctgatcctgtaatgaagatttagtcagcaattataggtgcaagagctcttttcttgaggctgcagtacccaaaaaaaagtatgggtattaatctatacccggctgcgtctcttctcttcctccctttgtgcccttctgagtttttgctcttccaaaatggcaaccaaacgaaccttcacatgcaaattcaatattcctcgttatatatagaacagaaatattcagcctgatgtgtgattaatatggccaattcgctctgcgacttaccccatcatataaaaatggcacatttctttcatcctcccatgcaaaagttttggctatcaagctgtcaatcatatctgcaaaaaaaagtttttatcgcaaaagacaagcaggttgagttagaagtacatcagctaattggcaccaataatgttatacgtcactttgctagatttggatcccattggcactgactagtagcaccagcatgctcaa

SEQ ID NO: 9137 - DNA, 627 bp, Zea mays
gttcttctggatgctcatgctgcggcgcgacgtcgagcgcaaggtggtcctggagatcgtctccgtcctcagggagacgcgtggcgacgactgcgggaggtggaccgaggagccgctggacttcgacgagctggaccgcctcgtgtacctgaaggcagcgttggcggagacgctgcggctgtacccgtcggtgccgcaggactccaagtacgtggtggaggacgacgtgttgcccgatggcaccgtggtgccggccggctcagcggtcacctactccatctactcggttggacgaatggagagcatctggggaaaagactgctctgagttccggcctgagcggtggctctcggctgacgggacccggttcgagccggccaaggacgcgtaccgcttcgtggcgttcaacggagggccgcggacgtgcctgggcaaggacctggcgtacttgcagatgaagtctatcgcttccgctgtgctgctgcgccactcggtcgagctcgtccctgggcacaaggtggagcagaagatgtcgctcactctgttcatgaagaacggcctccgcgtgcacgtcaagccgcgggacctcgccggctacgtcgcggcaccggaggaagaaccgcaagg

SEQ ID NO: 9138 - DNA, 558 bp, Zea mays
cgagctcggtacccctgtttttggactgacaactcaactaatagattttgggtatgcatttcacatgcaatgcctcttagaaaatttagtgacaaaattgtttttctatatgttcttacttctacatttctcctctttacattgaattcaggtcattgcagtggttggttcttcctgctttctttatctttgttatttcttgggccgtcttctttctgcaattttggaaaaggaagaattcagcacttcttgcaaggttatacatggtttatattaatctaaaaataactcatattgatctggaaatatcaggctaatttcttcacaacggtttccttacctctatgatgccctccaacagatggggtattaattgttcactatctgaatacaaaaatctgggcatcgaactcagttccttgagtgattctcttactgttgaggaaaagaagttttgtgatgtatctgctgagaaaagcaagttacaaaggaacgaatggttcggtgttctccttagaataaggaacaatgctatcattgtgctggctatcatctgtc

SEQ ID NO: 9139 - DNA, 863 bp, Zea mays
tgagcagtcacactgctacgactatgactgtataataagggtgtgtttggtttgacttttggctttgacttttgcccccctaaaagtcaaaagctaaccaaagggctggatccagaaagcagctttttctaaaagccggctttcttgtagtgcaaatctgaaagcacccctggacctgcttttagtggcttttcggatggaactgtgaaaacatatatcgaagaatttttaatgacttttagttgtttccaccaaacggtttttagctttttaacagctcacagcctacagcagcttttttcacagctcacagcccacagcaacttttttcacagccacagcctaaccaaacagaccctaaatcaacatacggtacgaatatgacatcagaaaccgaggctatatacccaggcggatggcacaacaaacaggcagcaaggtttggaggtcatcggccaatcctactggaacggtttcagctatagcaatgctcagtctttttttcgcctcaggaatacacacgagcgcgcgcgcctttaccacacaaaatcatccttcgcataaatatacgaccccaagaaaaccaactgggaaaaaaaatcgctatggctaacatatcgattcaacaatgtacagatactgtcaagacgacgaccgacactggtgcttgtggagtttgcatgcccgaccaaccaaccagccaaccatatccagcttctttgtcaggctcatactcaagcaaaacctccgttttcctggtggctagcctagctagtcctcttaaaatcagaacttgaaaggttctccattcggtgcgtcctttggagtgttgtttccgctgctatcgcctggtatcgctagca

SEQ ID NO: 9140 - DNA, 1809 bp, Zea mays
ccctaggccggtgcctcgcgctgacatcccgcgggagctagttgtggtccccgttccggcggggggtcgcgacccacagctcgagcaagtccgcggggcgcaggccaggctcgacgagggagcaggagcgcttgagccgatccgccgggacgtcgggcaggtatgggcgggccaacccccggccggagaagtatgtcatctggcccaggatgtccagcgccgcatcgctgacgatgccagggcaaggccgcccccggcttccagtggggtcggccagaacctggctgcagcagcaatactactccgagcgatgtcggaaccatccaccaccgaggggcggcgtatccagggagaactcaagaatctcctggaggatgccacggtccgacgggccgaaagctctgcctcccgaaggcaggggtacccctcggagcatcgcgccgcgacttcccgattcatgcgggaagcctcggtccacaccgggcgcacgcgcaacacggcgcctgcggccccgggtcgcctcgacaacgagcaccgccaccgcaaccgtcaagcccaccttgacgagagggtgcgccgaggctaccaccccaggcgtgggggacgctacgacagcggggaggatcggagcccctcgcccgaaccacccggtccgcaagctttcagccgggccatatgacgggcgccattcccgacccggttccgggccccgactaccatcactaagtacttggggggaaataaggccggaactgtggctcgcggactaccggctggcctgccagctgggtggaacggacgatgacaacctcatcatccgcaacctccccctgttcctctccgacgccgctcgagcctggctggagcacctgcctcctgcgcagatctccaactgggacgacctggtcaaagccttcgccggaaacttccagggcacatacgtgcgccccgggaactcctgggacctccgaagctgccgccagcagccaggggaatccctgcgtgactacatccggcgatttttgaagcagcgcaccgagctgcccaacatcaccgactcagatgtcatcggcgcgttcctcgccggcaccacttgccgcgacctggtgagcaagctgggtcgaaagacccccaccagggcgagcgagctgatggacatcgccaccaagttcgcctctggccaggaggcggttgaggctatcttccggaaggacaagcagccccagggccgcccaccaaaagacgcccccgaggcgtcaactcagcgcggcgccaagaagaagggcaagaagaagtcgcaagcgaaacgcgacgccgccgacgcggaccttgtcgccgccgccgagtacaagaaccctaggaaaccccccgaaggcgccaacctcttcgacaagatgctcaaggagtcgtgcccctatcaccaggggcccgtcaagcacacccttgaggagtgcgtcatgcttcggcgccacttccacagggccgggccacccgcagagggtggcagggcccgcgacgacgacaagaacgaagatcaccaggcaggagagttccccgaggtccgcgactgcttcatgatctacggtgggcatgcggcgaatgcctcggctcggcatcgcaagcaagagcgccgggaggtctgctcggtgaaggtggcggcgccagtctacctagactggtccgacaagcccatcaccttcgaccaggccgaccaccccgaccacgtgccgagcccggggaaatacccgctcgtcgtcgaccccatcgtcggcgacgtcaggctcaccaaggtcctgatggatgggggca

SEQ ID NO: 9141 - DNA, 551 bp, Zea mays
tgggatgagttcaggaggtttagtagggacaacggaagaaggatcgattggagtggtgctttcacggttgctctgcattaaacaattgatcaaacaatttatgttgcaaaagtttctaatagcaatgatggtaaaaatacaaatatcaaattttatacctgttgtgctacagcagcaagggcagcaaccatttcttgcctcatttcttctctaagcacttgtctttttctttcttcttcttcttgcagtgcttgcattttttcctgtagtattctttctcgttctgcaacctcacacgcaagtttttcatttaacaactggacctgactttcgagttcaatgttcttttggttggttgcaaccgtggcacgagcttgttcgaggaactttgattccatcacttgacttcttgttggatatcttgataggtacccatgaccatgaagtctgtttgccttacatcctgttgtttcctttaatgttgtttggaaaatagcattttcctcttctcttgttagcttaaatctttctgtttgatatattttctcaac

SEQ ID NO: 9142 - DNA, 626 bp, Zea mays
caactactccagcaaacaatagccatataaggaattgctaccaagctgaaagtaaataatcatgtgaaaagtataaacagactcaccagttcagtgtctagagaaattcccggaaaaaagactagtagaactctggaccaagatattatttggaaaaggtaagcagactcacacaagctattgtttgctggaaggtatgtggaaggtattcagaatcatagaaaaatgtggaagaatcccatgaatcaagccatgtggaaggtatcaagaatcataaaaaatatgcatattcttcttgacagcagcagaaacatagcagaaacatatcaggtggccatatatttgtagctaaactaatttgtattttcaatatatgaccgtacatatcatctaaagtcaaacgatgtagaactatgctaaacatactaatcaatgcagtacaagggactacttggtacaaatgatggcaacgggcattagaaatttcacagtttccaccattgtttgttttatgcagttcaagccttgtaattaccttggtacccatataagctaaactgtgatatactaatatcacagttttaccttctgatttgacttgtagttctgttccttcttcccttgca

SEQ ID NO: 9143 - DNA, 587 bp, Zea mays
gaagtggctgtggtgtctggttgtcccacctccagtcgataatattccagtaaaccatgtaatcgttcttactcaccagctcttttttgattgctgcttttgccttgtacagtccagcatatacataacccatagaaggcctcttggggttaccgactagcttaagaaggtgcacaagttgctcagtgatgtgaacgacggcagcacaggagttccaaaactgcaaattattaacaagattgcttgcttcaatccctcctttctttggcaacaagtctatccattcatccgagttgaccatagcttgcaaagcctccctcaaaccgtacatattcttcaacgtcacaaagttcatagccgcacgagtctccgcaggaaccagcagatccttcccttgcagatacttcttcatcagattcaacgcatatgcgctgttgtagacaaatcccgtaatggcctttgcattacttattatctcactaattgcctccaccttactgaaatcttcgagcatgccatcaacacactggaaagtgcatggagaccagaacaatgtggggaatgtttcacctagcttttttccggca

SEQ ID NO: 9144 - DNA, 652 bp, Zea mays
tgatatatgttagtttttccagctaacatcctgtatggtgtagaatcgcaaacattgttgctaacatccataaaaagaaaacattgttggctacatgtttctgagcccgatgataacctaaactttttcagtgtcaatgggaagacgatcgatatgactgaagatcaccgggtagctagcgcaactgaaagagctaggatagcaagaactgggcagcccctgaaagatggggaggtccgtcttaatggtatgattcggtctccatcgtttttgcttccatttacgttggaggcgtaatcaatgttttgttgctgtttcaacaggactgaaccttgcgaggatgtttggagacaagtttcttaaggagcaagactcacgcttcagctcagaaccatatctgagccaagctgttcgtatcaccaaagcgtgcacagcttttgccgttattgctaggtaactcggcgtttccctgatgctagcaaggtattgctactgttataatgcaaccatctcttgactattcatgttttttcttcctgtatttacgcagtgacgggctttgggatgtcatcagcacgaaaagggcggtacagcttgttgttcaggtaaaagaatctgatgactgttttttttcctgtccttgttctgcaga

SEQ ID NO: 9145 - DNA, 558 bp, Zea mays
gaaataactagaagtatctacacagaacaaagtacattgcagttattaaccaggatctgatgttctcacttgtcaaggatgatcagcgtggtgttctccgggtccttgaactttagtgtcaactttttcaagaatccgtttttgtcctccccgttgtaaggtacggcagcagccttcttcttagcctccttgagatcaggcgtgccggcctctcgtgcatccttgagcggcctgatgtcgacgagctgcgcgtcgggctcctcgagcagccgctggtaggccgccttggcggacaggacggagtagggcttggagctgccgccgccgccgagaagctgcgcgaggagaagcggcactgcgatggccgcgacgcctgccgcgacgacgagagggttctcgttgacgaagtcgacgagcccgtcgaggccgagctccgggagcgcgaacccgccaacatcaccgccggagtcggacgagaggcgcagcatctcctcgtaggagagcggcgcggcgagtgcggcgccggcgccggcgcccgcgtgcgcgaggccgagcgca

SEQ ID NO: 9146 - DNA, 654 bp, Zea mays
tgccagcggccataccttgtttctttggcgtcctccgccactgtacaaattgcagcgggctgattatgatattcctgatgagtgtagagtcttaatgttgacaatgaaaaaatgttgaatgtgctgctaacacatttcaataaaattttagcttttacaactttcacgacagggctgtgtgtactgctaacacattcctggccagattgcaggctattccttttgccctttactttattactgttggtactgagaaactgacctaaacctgccgctggggaacaagtaactggttcactactgatttctgaaacattggtgcattgcatattatgtagtaggcactgaaagtaaattccttggcaattggcattaactgttttcttcattatgccattgtacttctgcttttctatttaaacattttcagtgcctattaatgagctgtggctcttacagtagtttaggcaatttcaattgctgcaggcctattgctgccgtctgaaaccaaccttgctgtttactttgtttcatgcagtgaggttggcaccagaagaggagtcacacaagcttactgggtttgtgcataacgctgtcacttgcatcgggatggaaacaaacataccggtaatgtaaatttatatttacattgca

SEQ ID NO: 9147 - DNA, 988 bp, Zea mays
ttgactgaccaatccattcaccaaagcctgacgagaagaacagatgagtataatgacagcaattcatgcaacatagagatcaaattaaagcacggcacaacacctggaggttggaaaagaacgaagagatccccaggtcaggagaaatcagctggtaatcaggtatcagaccaccacccgaagcagcttgcagcagaccagcaggaacaagctcagtacattcagcagagttcaacttcagaccagtggggatgctgccctccaaagcgaccccctgatccggagtccgagccaccatcatgccgccagagtgtggaggtgaacccacatgaacatccatggaagtgcaggagggagaccccgctcggacaccctcgggggctgggtcaaggttggcactgcccacttgagccgggtcacccccggcaacaccctcgggggctgggtagtggcctacactcctcacctgagttgagtcctccccggcgacaccctcgggggctgggcacgtgtcagcactattcaaaggatccaagctctctgccgtgaccacctctaaggttgacgggccctcagctacttccgtaggatcaggacgatccaagtcatcatcccgaccctcgagatcgtgctctaaggtcgacgaggcacgggacgacctcaacccagcatttggcacggctgcacaagtttctgttgcatcaacatccacaggttccgacaataagttcttcgggaccatattctctaaagcttgatcaaagttggccatggacagttcttgcaaaccaataagggcagaccaagcaggaaaaggaacttcactacttccaccggtagcgacgaactggccactggttttccgaattaatggaatttcattttcttccttcttatcttccacaggaacaacacaaacaacattcttattggggtcaacagcaggccgaacacacccgttgggatcaatggcaacaagggcaattgc

SEQ ID NO: 9148 - DNA, 643 bp, Zea mays
tgccgatgcatttgctatgactgacccaggaagtcaattctcttctcttgttcaaggttaccgcatgtactatggtggtgggaactttcccacaataaggccaaacaagcgccggctagccagcatacttgtgaagaatgccacgattgagtggaatgaatttgaaagtagagtaaggaaactcatacagcaaactaagcaagttcatgagaggcctgttgcaagaagcatatttagacatccacgatgtccagaatgcatgtgcagaacagagcactaatattttgatagtttcttgtatctataccaacagttgttttttcagaagaaagactaccaattagatcgccaaaggtagttcttttgtgctcccgctgaaatctggatagatctcttgcccttgaactactttggaatcaaactgtacaaaagaaaatatagtgattgagcccttgtttgtatcagagaagcaatatagctgactagctcatcaattatcttactgctatggtctactgctaggcatcatgttggatttggggtatttggcagaactttgtctcatgtttgatggaagtagaccagggactaaattgattggggtcagctaaaccattctgtgaatgaaggtgcatcatctgca

SEQ ID NO: 9149 - DNA, 1095 bp, Zea mays
ctcggtaccctgcaaaagcttcataaatattactttcaacactaaaataataacacgatactatgctcaacaggagtaattggacttcaataagataattcacctaacccaactactttgattaacctcacatacaacaatacctcctattattgcacttaaacaatttgtacctcgtgatatcacaggatgcattcaaagtagtagacatacatgatctatcaaaccatcattcatataataaaaatctcaatccgatgcaacaaccccatcattaaagagatagatgactaacaaacataagcaactcccagttaagcattgacttcgtttaagataaagcggtccaaataatgattcaacaagcatgcatagagaaactgatcataaaaaaaaatcaaactaccatacaatgttggcaaataaaaaaaatataaaatgggttgtcaatatcgtccacatgactagcctgcaacaactaaaaattatgcatagcctttatggctatagaaacaaaccatagaaggaaaacatgcatgcctcttctttataaagaagcaaaacacaataggtgcgagagattctccaaatttattcatatatcactttgcacaattacaaatcctcaaagggggaaacaccttgacatttttttcttcgtgagacatactctttctagctaaatgatatattattcttccttgtcagatgcaccaatcgaaggtcgattgtcttcaactactattctttctccagatggggtttccaaacacatggttctctcaatatgttggattactgccttagttctttgtaaccaattctttccaagaatcacatcctttcccattgtttctatcactataagatcatctggaaagtctatcccattgattttaacacttacatttggacatatgtagtttactaacatttttccttcgggtgcactaatggtcttccttgatctcaagggacacttaaagataccatattttgttgcaaactgggcactgatagaagaatgtgttgtacgaggatcatacaacatggtggcgatagttgtgtgaatgactagtgttctaaaaattactg

SEQ ID NO: 9150 - DNA, 632 bp, Zea mays
tgccggctccacggacgacgaccgcccttccctccgatcactgagtgaaggagcgggccaccgcccacgcaggggccgaccccaactcggcacactcccctccccagccctggtgatgaaaatccttgaggctgagggaggggcagaggccacagcccggctcgctttcccccaccatcaagctggaggtcaccatcttgggtgaccgccggcggaggggtgtagccgggctgcatgatgaaaatccttgaagccgaacgatggctgagaggtaccaactcccgcggagttgcgttcctccaacgatgaggcggaaagacggcgggtatcccccatccgggggcttggaaggtggaaagacatgatgcataagggagcgcgaagacatggttgccttccaaggggggtcaccctccttttaaaggcgactatccctacttgcgtccccagccgtcatgggctgagtcttctccaacacgctccaaggccctcccctgcggcgcgggggctgggtcccacatgtcatgcaagccggctcagagcagaagaagccaaaccgccgcgcgcggtgcgcacaaccgcccagcggttacaagtgaccctccacttttgcccagaccaatgggcgcaag

SEQ ID NO: 9151 - DNA, 608 bp, Zea mays
ggggggcttgctgcttcctgcagccgtctctagaggatccccctgatagtcatagaagggagctaagagcttgttcttggctgcttgaccgattcttgattgagctgctgcggatcttggcaaagggccaagagcttgctgtgtctggaattcttggtcagccgtgccggatagggtgagggtgccatgacagcatcgcagtcctcgatgagcggcggcggggagccggggatgcggacggtggtctggttcaggcgagacctgcgtgtggaggacaacccggcgctgtcggcggccgcgcggacgggcggggaggtcgtgccggcgtacgtgtggtcgccagaggaggacgggccctactaccccggcagggtgtcccggtggtggctcagccaaagcctgaagcacctggacgcctcgctccgccggctcggcgccggccgcctcgtcacccgccgctccagcgacgcagtcgtcgcgctggtcgacctagtccgcagcaccggcgccacccacctctttttcaaccgactctacggttcgatcccccctctctctctctctctgctctgctctaggtgttgttttacgccttgttacatgttgca

SEQ ID NO: 9152 - DNA, 574 bp, Zea mays
cctgctcggtacccctgttctctcgcccggtcggatcgctccctgaccgactcccgaccatgcggaccccacatcctatcgaaaagcgcccctgctgactgcttcaccacggggtctttggccttaaagatgtcacgctcaaagttctcgtctgattggtcgaagacctcgtagtgcctgcagccctcgcaggacaatgcattcatggccccctcgcaggtgacgagggaggcgaagtacataaaaccctccacaatggtcgggagcactagcagctcctcctgcaaccattctaggaagcgaaggcccgcctctccgtcaggtatctcgaagtcagcagtccgtgcacccagctcgcggtacgagcccacgaactatgcgtgtgtccgctcaacttttgagcgcgtagaggcctcggccttgtccacacggctgcgcagggcgttgaaccttacctcctgctcttcgacgcattgactggtgagactgctctccgcccacgccactttggcctccgcttgcgcagcctgcgcctcggcgatcgcctggttcgcctccctcctctcctccacca

SEQ ID NO: 9153 - DNA, 570 bp, Zea mays
cgtctcctttcctgctctaccgagcagctcgcccagccgccagttctccccggcctccgctctctctgccggtgctcctctcctccagctcaggcgcccggccgagcgccccttattccgcaatgtcgccgaatcgtgcccctgctcctttttgtccatggctctgctcgtcctccacctcagggcttgttcggttattcctacatcatatggattggatgggattggaaaattttagtagacaatatgacttgctatggatttaaactcactcaatcccctccaatccacatggattgagatgaaaccgaacaagccctcaagttgcgccctgggatttgcccaaaacctcaatcgcctcgacgccagttcccagcttctactcaaacggcttcaggctcggaccgcgccctcctcagccggcgctcatcttccacggcactcagtttgcccagctcctctcccatggccgccccctcccgcagcttcatcttcagccgctcagttccctggtgcgcgtgttcctgctcctttccacaccgcgcgactgcagaccgaggagcaatccgc

SEQ ID NO: 9154 - DNA, 1215 bp, Zea mays
tgcctgtttcaattgtcaataagatcagtacatggcagagaaagtcaaaccaattttgaatttcagactcatgcttactaggtctctgtagaaaggtatctgttcagggagcaatgcaaggttagcgtctacccttttactagcatattgctccccatatctcctggtatctagcagaccagctccataatcaggagcaccagacagaaaagcaaatactcgagctgctctccatatgacaaggaacattaaaaaattacgcatagagatactggttactagattgtttgcaaagtgtaaacatacatcatcttatgagttattaagctaattgcctgattgacaccagatatttcatgagatatggaaagtgtgtccactcacccaaagcaaaagtagaaccatatcctgaacttaggtactcaattaaagcagacatggctgtcccaaaaccacgtccgccaagcaaaacagcatcctcttcatgcccagaagcaacccctctctcccatgaagatgtaggtcgcagtgtctccaggacagcagcaatttgatccttgcatgtgtcaacctgcccattaactatcttaccattaggcaataagtctatgtctaaatctctttgtaattctgcagtgggccgtggttcaggaagctctcgctcgccttccgatctgcctcaagggtcgcctccgggtcaccgtcgtccctcatctccagattggctgcatcaataagaagtttaatttagcttcttgtccagtttttttttactgcagctttaacgatgaatcatcaatggatcccaaattaatattttcagttttttgtcaggcaatgtgcttccagcgaatttcgtcagaacatgtgttggatttgcaatacttacattggctacattttgtgttgttcttgttgtaaagggttactctgcatgtgacataactactgaatacgatgaggatttatctttgaacttccccgtccgattcattgacctctcggaaccaaccaggaaatccagtttttaggcagaaactgtgttaatttaaatgctgttactgagattaagtactaaggccgaagcgatcacatcatgctatttgttggcatgccaactaggatcttgagtaacgcttaccagcgagatggtcgcagggccagattgcagcgtattgctgctgcctgcgctgggacgtctcaaagctaaccggg

SEQ ID NO: 9155 - DNA, 1235 bp, Zea mays
ggtcaaacgggcccagctcaacaaaaagctttcgaagtaactcaagcaatacctgatagaataatctttattaactccaccaatgccaggggctcctctattgttgtatgtggcagcttcgcactcagcagtaagtgcggcacttgtgcaggagaagtttgatggacaaatcaagaagcaggtcccagtatattttgtatctgaggtccttagtgtctcaaagaaaaattatacagaactggagaaggtgttgtatgccgtcctaatggcatccaggaagcttcggcattattttcaggcatataatattattgttccttcttcgcagccgttgaaagatatcatgagaaataaagaagctactggccgaattggaaaatgggctgcggaacttaatgaattttacattgattatgtgcacagatcctcgattcagtctcaagcattggcggattttattgccgactggacgccaggggctcagggcgaagaagcaaataaagatgccgaagcatggacagtgttttgtgatggctcctggggaaccttcggagcaggagctgtcggccgagagagaccacgcccggcccggtcctcgcgccgcatccggacgcggccgccccgaacacggaacacgcccgcggtcccagcgaggcgcccagccacagcggggcgcgcgcaggggatccctccgcagccgagcaacgacgacgacggggcctgccttggctgccgccggcctgggcacacgtgtcgcgcgggaccctcccctgcccacacgcacacgttattattttattctcaaggtcacgagtagcacaacgcagccgcgattccgtcctactcgtacgaaccgatcgtcgccggcgcggaaaggtgcaggtgcagccaccccaccgcaccgctcgaggagtcgtcctcgtcccgtccacacctgcctcctgcccaaggcccacgactccccgctcggctcaaccttgcatcgcatctgccttttttcttcttttctcacggcggatctgtactgtacgcggccgccccgccctgccgtctacttgacgctgccataccaccatggaattcaaaattatttcggcgccgcttgggccgtggtgcggtgagaacgatgattactgtcgttatatggcgtagcgtggaaagcagcagcgcaaacaagtggctccttcctcagcagacccggccatcggcggtcagggggatcctctagagacggg

SEQ ID NO: 9156 - DNA, 679 bp, Zea mays
  unsure (1)..(679): unsure at all n locations
atataccttaaaggcctccgggctggnnnnnnnnnnnnnnnnnnnnnnnnnnnnnnnnnnnnnnnnnnnnnnnnnnnnnnnnnnnnnnnnnnnnnnnnnnnnnnnnnnnnnnnttggcacccgagaatcctcgcgctggcgcactccaaattcctcgcccccacgccggttcgaccgttgccaatctccccgcgcgcacgcgctctccatctcgcgatccccaccccgagccgcgagcactttcccgggcgggggcgtatggcctgcgccgcgacgatgccgatcgacttactccccgctccagccccggcggaggaggaggtgaaggcggttgaggaggacgaggagatggtggtggaggtggagggagaagggtgcggcggaggggccgtggtggtggccgtggcggacgcggaggcggagggtcacccctacgacttccacgtgtccgggccgcgcaacctgccaccgcccaactggaaggacataatcaggtcgagctggtaagcgatcgcgcttcccatgtctttgaaatcatgtacatttttccgttcctgaatgatgatgggatggccagctccggatggcgggttatttgtatgtatgtggtttcgttcaagctgcgggcctctaggtttcagtgggatcagggggcgtcgcttggtgttgcaggcttgca

SEQ ID NO: 9157 - DNA, 632 bp, Zea mays
tgccgaatcaaccgcctcccccggcgagcgcccccttcctctctcccatgggcccccgcgcccgagccgggaccgcttcgcccaccggccggtgcgcgcgccatagatagattccacaagcttcgcgaccagatccgatgctggaggccaccgccgccgcctcctccccccgcgccgcggccgcggcagtcgccgccggggcggccgccgccgcggtcgtttcctccccgcggcggggtggaggctccgcgcacaaccaccggcggtgggccccggccccgttcagggcttgcctgctcgcgctctggttgctgggcttcgctctcgtcttcctgtggcagagcacctccgtgggccgcgtgcggctctacacgcgcccgccgatgccgaagcgcgccgtggcgtcgttggggcagtgggcggcctccccgcccgtctacgatctgagggagttcggggcggtcggggacgggcggacggttaacacggccgcgttcgagtctgccatcgcggcgatcgccgagaggggcgggggcaggctcaccgtgccagccgggcggtggctcaccgcgccgttcaacctcaccagccacatgactctcttcctcgctgctggcgctgagatcctaggg

SEQ ID NO: 9158 - DNA, 627 bp, Zea mays
ctgcatgttccacatgtgatccccatcaacgcatgctcgctcggtcgctccctttcaaattgcaagccaagccgtctcaagtctgtagcctcgatttggaactttgaacggaggtaggtaggatggcttgcggtctcaaactatgctaccatgtttggatgcactagagtagctgttaaaattaatcaaagacatctaaacagtctagctagtagtttaactattagcttttctttagcaaactagctaattcgactaataatttttttatcaaagaactattatctctgcatctaaacaccggtgttcaaatgcactacagttaacagttagctgctaaaattagttgaacgcagctaatagtttggttattggctacttttagcagattaggtggctaattcttagcatccaaacagcccccctaattatagcgcaaccgcaatgggaccgaaccaatgggggtatgggctgacgagtggtggtaatctagcgcaatcagagacggctgagaggcaccacagtccacaggaataggtcgacatcaaacactaaaaccatgtcatgatcaccaaataatggccccatgtcatgatcatcgaacaatggccgggtttttgcgtttca

SEQ ID NO: 9159 - DNA, 564 bp, Zea mays
tgtagagattcagccgtgggagcggaagcagcagccagtacctgcagtgtcccagaggcccaggttgacgatgctgccgtccacggagacgttggcgctgaagttgtcgaacaccgtggggatgtaatcctgtcaggaacccagagaacagggcgccgtcagtttcagcgagcagtgcagtgcagtgcagagcagaggacggaatgagtgtcgtgagctcatgcatgagcgtcagtgcgttaccgtggggaacttgttgctggtgtagcagatgagcatgcaggtcttgcccaccgcgccgtcccccaccgtgacgcacttgatgaacttggtcacgctcatctcctcccagccccggcctctccttctcacaacaggcggcggcggcggcggcggaaggcactgctccgagggcaagcagcaagccaagagagcaggaagcggaggaacagagacaacgacaacggttgccttgctttgcttatcttctacgagaaggaaggcaggcaggcaaggcaaaaggcaccgcacgggcaccggcctcccgcatttacagaactcgcc

SEQ ID NO: 9160 - DNA, 639 bp, Zea mays
tgcgtgggcgtggcgacggtggtggtgcggtcgaactcgccgacgaggcgctcgttggtggggttccgcggatagaagggttcgtgggtcaccgacggcttgatccggtacagccacctgtaataacagaaggagcaaactgaatccgatccccatccctatctctatccccacggaggggaagcttgtgtgattgcctatggaaagtggaaaggcagagcgagagagagatagagggacgtacgtgcgcaggttccgggcgcgcggggtggtgaaggaggtgccggagagctgctcggcgtagagtcccagcgggcacaccagcgggttgttctgccccacggggagcgaccccggcaccgcctccgacgtgaaggtgttgcccaggcccgagaggtagcgcagctcgggtggtgtctgctcctcctccatggccattgcttgtcgaggatccaaggaggaaacagatggacgcacggacggggcaagccggcaacggcgagaccagcagagcaggcaaggagcagacggcacggcacgacttgcctcctgccgctgactgcttgccacctgccattgtacatatcctcatctggactgtccgatgagggaagcaacgatccagatggattgctcaac

SEQ ID NO: 9161 - DNA, 610 bp, Zea mays
tgttgtgacttgtgagtttaaggtggagggtgaaccacatacgtgccacgacgcgaatgggctttgtcagagaggccataacatgagtagtgcagcacagacaaaggttttgcagctccaaacttaatgcgagaaaggcgagagtgatggacgacttccagagatggatgaagtgagacggaagaaagaactttttgctctttaatactatgtatagatgtagatataggtaacatgacactcttgtccaaagagatgtgagggattactgactgagggacggaagaggagtgagaaagatggtttctagaaactaagcggcagaagatacttccgctctttaataagaggtatataactatatatagatataggctagatgttttgatgcaaattagaatgactataatgcacgaatggtattgaattgtcgaaccacatttgcatttaatgtgtttactgtagatctagtcaacaacattgggcaggttgaaggactgcatccgtacataaatcctgtggttgtctttttctgctgagatatatatcatttctaatatcaatgtccctttatcagaaaattgcttccatcaagagtgggctggatgca

SEQ ID NO: 9162 - DNA, 593 bp, Zea mays
tggcaggcttgccgcctctggccattctcaatgtgtgtgaggtaacagacgggtcactggaattagtgtagtccactgtagttattaattttttccagtcaaaaagctcaaatacaggtgtaaaattattagatttacaactcattcaggatcacgagaaacgaggagcgaggtgagcttgatttcggccggcaaataaatgtggttcactgaggtgattttttctagttggaaaactcaaataaaggtgtaaaattaatagatttataactcatccaaacaagtttttcagcttgacctgtaaaaattgctggaactgtattttaaactggtattagccataaaactggttaaatgctaacaaatgcaattttcatgctatcatatttgtttcctattgtacaggttctaccggcctgacaataacatatcatttttttcagaacgatgaaaagtatagctgcagcgaaactggctatcgcctgcccttgaaatgtgtacaggcacaaaatgctacaaaagaaggaaacatgagcaagcagaggaagatattggatgatgcatccacatcaggtggcacaaaatccgcatca

SEQ ID NO: 9163 - DNA, 570 bp, Zea mays
tgcaaatcatgggatgcaaattagtaacagataatttattgactgctctatcaaagagctgcctgcaattggtagaacttggagctgcgggatgtaacagcataacagatgctggtatatctgctctggctgatggctgtcatcacataaaatcactagacataagcaaatgcaacaaagttagtgatcctggagtctgtaagatcgctgaggtttcttcatcatgcttggtgtcaataaagctattggactgcagcaaggtgggagataagtccatctattcgttagctaagttttgcagtaacctagagactcttgtcattggtggatgtcggaacattagcgatggctccatacaagcacttgctcttgcctgctccagtagcttaaggagcctgagaatggactggtgcttgaaaataacagacacatcattgcaaagcctgctgtctaactgtaaacttcttgtagccattgatgtcggatgttgtgaccagataaccgacaatgcattcatggacggggaaggatacgggtttcagtctgaactgagagttttgaagatcagca

SEQ ID NO: 9164 - DNA, 639 bp, Zea mays
tgctgcttacctgtaaggaacatgaccaaggtgttctaccagtgccgtaatcacacggcccagagtaagcaagcttttattgatttcgccagcctcccttgcgcggccctatagtcaagaggaagtgtattggtttggaatgcaatataattgatgataagagcctaagagatgaagatattaaaagtgacattcaagcttgttacacgatacaatacctccttagctccagaacgggagatgttctcagacccagccaagtcaactagattcagttttccacattttatcagttcttctccttcaggggttgcctcttttatgtgaatagtgattgagaacagggagtgcgatcgactaaaatgttaaaaagtggtaatgagcacaagtttgttgtagcagtatagttcagaagaagacaggctgagattgacctggattgcttgttcagtaatgtctctgcagtgcggcgctttgcagaccccctttctaatagagagaatatttcacttgcattcgtgacaatttcttcctctagacctcgaacaagaactccgttgcgattggttggttggtttcttgaactgggctgacggtggttaatcttttcgatttgattatcttttgcactaggccgca

SEQ ID NO: 9165 - DNA, 706 bp, Zea mays
tgctcggtacccctgctcgaacgtgaacctggtcgtcatcatacctggcacttctccaaggccatcctcgtcgtcctcgtcatctctacgccgatatcgcctccggagaacaaccgaggtaacgacgatcacggctagtaaagcaatggcccccgcaagtgcggagccaacgatggcagcttcacgagtccttctccttcctttccctgcgggtatggccgtcccattcgaattcgagggaccagggacaggaggaggaggaggagaccttgtgacctgcaccttgaggtacgcagaagagctgtagtgagtttcttgccactggttcacctgcatcgagaagacctgcgtcggcaggtaacaggagccccgggaggtgtcgttgccgccgtactggaagaacgcggctttgcaggagcagttctgcaagcatgccttcttgcagctctcttcgtcgatcatccgaggcagcgcggccttggtatccacgtagttgaagtaagaaacgttgctcagagcgaggagccggtggtcctgcgtcgaggcacatgagatcggggccacgggcacgcagccgaggtcggtccggcggtcgtcgacctgcctgaagtacgtcgcggctgggcacgtgcactgcccgctgacgcagatgccgtacgcgccgcagacagtcgggtaagcgcagggggatcctctagagtcaact

SEQ ID NO: 9166 - DNA, 730 bp, Zea mays
tgagaggatttggaaaagttgggctcctccgtgttgcaaattctttgtttggttggcctctcttgatagatgttggactgctgacagactagctcgtcggggcctcgatcacccgaaaagttgccctctttgcgatcaacaggaagaaacagtccatcacattttggtttcctgtgtttttgctagggatatttggtttcaagtcctaagcaaggtggggttgcagtctctttcccctggggctgctgtttttgttttccaggaatgatggagggaggctgaaagcagggtgccaaagctccagaaaaaggggttcaactcaatagtgatccttgtggcctggtggttgtggaaacataggaatgcatgtgtgttcgatggtgcctccccaaacagcaacattgtcctgcaacatatctatcaagatgctcatatgtggggaatggctggggcagcagacattaggaggctctggccttagcgctgggagtgcttgtttgctgctggtttgtagtagtgtggttcttcatgcacatttatgtgtatgcctgtgcttggccgccgtaaggaggctattttttgtactgttttggccatctaagacctttttctcttcttaatataatgatgcgtagttctcctgcgttttcgagagaaaaaattattattaagttctcttattgataccttttgcagctcatcaagatacaatcgagcattttcacaggca

SEQ ID NO: 9167 - DNA, 741 bp, Zea mays
attcgagctcggtacccctgtttgtcatctcggccaggaccacctttaattttgtgcgtgcgtgcgtgcggtcgacatacatatattcttccgatccaaccagatgaagtcgatcgaaatcacgccctctcttttgctgacacatatatatgtagttaattaatcgtaattaggcacgcacgcgcacatgcatatctgtcgtatcacaccaaaaagaggtcggtgtgcatcatcatcgatcgcgtgcttttaattttattgattagttgcatcacatgcatatatggagatctcgatccatccattaatagagtgtttggtttgaggaatcaaaccatccaaaatgaggtggtgcattatgagttcattcctcaaatttggtggaatgactcaattcctcatattagtactaactaactaactataaggaatgaggtggtgatgtggatcaactcattctattccacaaaccaaacaaaaatagtaaggagtgagaagatgatagactagttcattcctcaaaccaaacaccccataaccgtatcgtatcgtcatatttcctcctttatctaagcaaggtagctcgatcgacctagtagtgatcgtcagcaagaaatattgcttgcttactcatcataacattgatccatgggttgttagttacttagtcttatatatacatggcatcacatgtagtacttgcacgttcgttggacgccgcgagcgcgagggtttatccaa

SEQ ID NO: 9168 - DNA, 736 bp, Zea mays
gcaggttcgattttagaagaacccccctgacctagtagaaccctgttcgacgtgcgtcgcgcatgcagagagactggcagagggcgaaggaagtttgccagcagatcacaggccgctaccagcgtgactcgaggccgtaccttcacttggtaatgtcgactttctctctacacgcgcggcgttgagtttctttggtcgtctgaaatgagcacgcactccatgttctcttcaggctgtgatcaacatgatgatagcggtggaagccatgctgtcccctgacaccgccaccaccgacgacatcgagaagatgaccaagaccgccgtggacgcctggaaggagttcaagaacaagagcgagctagccaaggggtcggcagattccaccgcctgatatagctcacgtaaatacaccgtgtgtgcttgcagtttggctgacgctgaaggtttctgtcgagtgctgattgatccagggatgactgatgaatttgtgtgtcctattatgactgccaagtcgtttcaattattccaatgtgtgtcacttaattttctaattattatttttacacttgttcacttcatcatttacaagaaaaaaaggttctagtttgtcaattattaccctgcagcatggtcctgcatttgcaataaataaataaaaaagaatggtcctgcatttgcaaaggccgccttactcagcagcagactccccccacatctggtgaaggtacccttcgca

SEQ ID NO: 9169 - DNA, 684 bp, Zea mays
tggtaatgccacatctaccatgctgcagctcattttcttattctgaagaattgtttattgcctaccatcgtctaccattttcttattctgaaatgattagctcaaaagtagcaggcagggaaactttttgggaacatatacattgaaataaagttcactggaatctgatgggtggtgttcttattcttgataatgatcaccatgtggtgccaatcaccaataattccgctgaaacaatgggcaagaactgatttttctcatttggcgaaaagcaatgttgtttgatgtggcacatcagaaacccataccataccataccatacaaaaaatttgccgagaatcatgggtaggtacatagtcaggactcagggaaagacctaattcctgcacggtcacatggccagcgaagttgtatcaccacttatttagaaggcatacagcaatgcgcagatgagaagcagtaagctcgctgcattctttgagtttgtggagcttgaggctccatttgctgcatcaaatagaacaccgttgccaggttagtgcatatatacattcttgtatagctaggccggtctccatactgtttgtaagcatgctaactactgcacgtaatctttgaagttttatcatctaggggcatgcatgtgaagcatctgagacgaaagcacctaaggggcatctgca

SEQ ID NO: 9170 - DNA, 1393 bp, Zea mays
cccgcccagcccatgatgaagaacagatcggcaccgtagagacagcacccaccatccgcgacacgctataattaatcacttttacactcggcatttacttagtgtggcgcgcgcgtatgggtgtgatcctctctcgcatacggacgtggttaggttgtcggcccactgctgtgccaattgccatccaacaacgcggatgcagtcaattaattgtagatttaattattatacaaaaaacaatggcaccgctgatatctataattaaattgatcataaaataacattacacgctaaatctgatatatatcgtaagtatactagctaatattacacgttcagcactgtcttccatctaatacttcaaatattctagattacaagatatttaagcgttattatatataactcttgctacacatttagatatccaatgtattcagaatttcagatacatacaagggccaagagcgtctctacaagtttagaatatattgctaaattaacatatctagctagttaacagaagaaattacaaccttaaattatgtcctttctcagccgtcacttaaaataataatcataatttattggtaacccaatcgaactaccaaccggtttttttaatggattacttgtcccttggcgctatctcactgtcccccgaggacatcagcccagcccgaggcctcggcagatcgactccggcgtcagtcccgctaacggacgacccggccaggctccggccgaccaagtcttcttttcgagccaactctgcctctgtccgtgctgacaccgctacccctggcttcggctcatcgaagagcggccgaggggttcctttaactaagcaagagaagcctcggacaacaaggctgaccgagccgagggactcctacgcctccgggatacggatacctcactcgtcacctttacacggggcgactcacgcttggtgaagcggttcagacaaccaacaggcgagtcttagtgctcgaaaaggaggaaaaaacacggctccgtgccgaaattacatacatgttcaggcctcaacagtcacaatgaacaaaaacactggcattcgaagtgccattacaaacggaactccggttccacctccgcgggtacgaacaaccccactcgatggggggggggcctgcggagcaacaaaagaccgacgaacggcacgccgtcgcccgctccagcagcgacgacgacgacgacttctgctccggggggccgaacagcagcagcgatgacctcagggcggatgctgctgccaggaggcccccgcccgtgcccaaactcatgaggcaaggatgggcagaaggctgtagagttggaggtcggtccgtgggcggccccggctatctcgtcgacggaagaacctcttcca

SEQ ID NO: 9171 - DNA, 692 bp, Zea mays
tgccgcgcatgctctacgcattctttgactgccacttgctccttcacttcttcatcacaagtctctttctctcataaaattaaaggctctagctgtctagcaccaacactgcctgaacagagaacttctcattctcaaccactatcaccagtttacaattacaaacgaacaacgaatattcttcaacttcaataagcgtatcacccaacttgtgcattctacggttacaatgcggcaatcaatcgtgtctatcagtttctggagtaccaaaatgggtcaccaaaaaaatcaatatatagcggggaaagtttgattttgtaatactaactctcacttgtacgtggcatatgcagtgcagcagattcaccactagcatatccatctctgccggaaagaagcaaaaactaaaacaaacaaaaaaaactattttcttcgtccttttcttatgtgccttcaaaaagggaaaaggaaaaaaaaaaactggcactaacatggcctgttagtatccaccttctgttttacctaatctgtaaactccaaacctgtaagaagagtctccaccattatgtattggacggatgaaaaaagcctctcatttctccattttctgaggaaacaaaaatagccagcagcaagctgttgttccttctcctttatagtattcttatgtgtccaaggaacataaatcaaca

SEQ ID NO: 9172 - DNA, 692 bp, Zea mays
tgcagatcaaagatggaatgctgagtaaggatgctcgggagtccgaatttagtgaagtgaatctcagtgccgcttagtggtttgatgggagtgcatgctctgtccgagctgaagttaatactgtgaaatgtcagttctctatgagatagaactatcgatgagtatggttttactgaagcgctcacttctagattattttggatctgaaatgattagttcaaacgtggtagcttacttttctgggacttcttcagtgcttgtttacatactgcttggtttctcacttcagtgctcttattcagtccttttgtaatatgtactgttgcatcacagagttctttcattttgatgttgttgttgagatttctaacctagttgtacttaactgcaggcaaaggcaatgaagatctctaatctggatgcacacttaatcttgtccagctcttgatcagttgatcttgtgctttgctgctcctgctcaagttaatttgttggccaatcaagttcagaggcgcagatgagtgaggagtacaatatggatgatgccctaaaagccaaaaatgttgctgagaccaagttccatgcccgtgacatcaggggtgctcggaagtacgcactcaaggcccagaatctctgcccgacacttgaaggcatattgcagatggtctcaacgcttgaagttcatcttgcaa

SEQ ID NO: 9173 - DNA, 693 bp, Zea mays
tgtggcggtggccgggtgacacgttttgaaaatgtgagctaagtaaaaagttagggttttaattttatatgtgggtgatgttttgggcctcttttttacagcccaaacaaataactttagaattgggccagcaaaattcaaaagcgctgaaaaatttgggcggtaatggaaaaaaccggggcccaccaaaaaacacgaaatttcggttttctcgttttttttttcgccgagatttttttccctggccggagctaactatccgtaaaaaccctaatatgtggtaactaattctacggcaagcaatatcttgcaagtttgttacaaggataacgtgaacgttgcattgcaatgagacttatccaatctaatttacacgcctcccagccggaatcggactcgtccttcccatcgatgtagcgtagcgggtctataaattgcgaggcgcatatggtcttctgaaacccacgccgcagcacggcagcagcaaccagcaatccacgcagacctctattcttccgcactcgcgcgccgcgtaaacgcggcaactcggggtgccgcctgccaacatgaaaaggcttcttttcgccgccgtctgcgccctcctcgtcctgttcaacggtgtgtatcttctccaactccttgttctacgtacgtctcttgcattacatattgatctgttccgcgcctctagca

SEQ ID NO: 9174 - DNA, 670 bp, Zea mays
tgcagtttaaatgctcttttttctgctgaaattgtcttgcactctctaatagtagtacaaggttgataaatactttaaactatccaactatactttcgtttgggtaatgtgcttgcaattttaaggagtttgtatttttaaatgttagaagggcaggctaggtaaagtggtgagagctgtctcattgagtcatcaaatcccaggttcgaagcagtctctttgtgtttaaggggaaaggcttgcttccgtttatctcttccccttaaccccaatcatgtgggagcctctgtcgttgggtgtgccttttatttagccaaagggctatagcacttgctatcacttagagtaacctattttgctttgttgacagtacgtcagtaccactaatgggtggtgatcttctaatacatggtgggcataatttgtgcagactctagtccaggttcctgatctgccacaactgcaaagcttagtggatcgtttgaaaaatgttggtgatctgctaactgtggctgtcacccaatatggtgatctccatctacaagtttcaacttctcttgttacggttggctctgaatttaggaagcttagggttattggggatcgtggtaagatactgcactaggtagtttaaatcagcattgagttcctattatgccctcttgtttac

SEQ ID NO: 9175 - DNA, 705 bp, Zea mays
tgctgttgccaacatatttccatctgacataatcaagtataagctgcatgtagttaaaatatgtgatggaactttgcttgatatggatttcatatacaagcaaaaatgcatataaagagtagaaggtggatcctaccaaggaccttggtaaaaataaggtgcacatgaaactaaataaacttttcagcgggcagcaccgcagcataaatgatatatcgatacatgtaacttatcaatcgatgaataacaatgttagatttccagttccttaaaaacatcataggtgacaatatatcatctcataatgcagatagacagatattcttcactgagttcatgtgccaagtgttaaatatataggccaatctagaatctaccagatgtaatcctgctacacttatagccacaacatatacattgaacaaaaacataacctagtgtcggttcatacacagcaatcggagcagtgttacatcaagaaaacacaatttatgagagcaagtgcagtagagccaacatagtcataaactaagaagtcatttcacagtagagatacctgatgacacagctaatgcagatattgcctttgaagaagatttaaattttccaacaacagccccattagaggcatcaatcctacagaccatgccatcagcacctgccgtgtacacattccgcccatgtttcgagtattggacaggggtc

SEQ ID NO: 9176 - DNA, 687 bp, Zea mays
tggagacagtattatgttcttatcttttatgagagcttccagatcagtttccataaactcaaatacaaggtgcaaattttccttgtaagggaaacaatcaatcagctctataatattaggacctttcagctccttaagtagtttaatttccctcaatgcggtgaagttaacaccttccttcttgtccttccctacccagattctctttaccgcgactgtatttccagtctgaaaatgaacagcatccagcaactcatgaacaaaacaggtcaatcagaatgaaaaactactactccctccgttccaaattataagttgttttggtttttctagatacattgttttaattacatatccagttatttttttaaaccaaagaccctacgtctgagtgcatagcaaaagatatgtatctaaaaaattatgtatctagaaaagacaaaatcttataatttggaatgtacagagtacaaaatatgagagaacattaagaacagtcggaaggctgaaccgtggtgattctatcacagccacgtatacttgactgagaaaagtaaaaacggtgatgacaccacttaagaccagtgagaacacatcccacatctgttgtcactcttacacgcgtggaatacataagtccaccaaaaaaaatcaatcccggtatccaacagaacacgagaactacca

SEQ ID NO: 9177 - DNA, 687 bp, Zea mays
tgaggccagaacctagcatataggacgccatgtgcttgtgcacgctctttgccagagcaaaggatagtcatcacagctcattacaacaacactgatggacagtgccaccccgtaatataggtttttatgtactgtaacagcgaaactataaaactaaatccaatcatatatttgacgaagcagtgaagagaacacatggtcaaattatcgtgcctcctctttattgccaacacaaaaaggttaaaagttttgattggtttacaacaccatacaaggagaagaaaaactgggcagaacatgaatggcattgttcagcttccatttctatgttcctgccgtccaaaccttatgccattagataacctccaaactgattggctctatactagctatatcccgctgcagagccttaagtgcatccacagaatagccaagaaaggaagccgaaaaattccccgaggagagccggaatattagggatgttttgaagggaaaaaaagataaaaatgagagctacactcgaagttcgatccacaccagttttcaagactagtcactctcgccatactgggagtgtgaggctgcaaggagagcagctccaatgccagagccatcgttggccagcttggcaaccacggaggaagaggcctcttcgccgagcaagtctgtaagagttgcttcgacgca

SEQ ID NO: 9178 - DNA, 744 bp, Zea mays
tgagtaaatcgattcggatcgccgttaccttcgcggttagtgaagacttggtcactgacctgcaacctaaagtcaggatgtgaacctcatggataaaaatgatgttgtattgatgagatggtgaaattagactagatgcaatcagagtctattaatacttaatatggcgttaaaacattgaaagtaaggactcactttagtaagctatttctgcaaaaatatctaagttgattcttgctaaagcctctccttgactcctatttatccagcatacccttgagagtcttttccttagtcgggtaagtcttgctgagtaattccatactcagggttttattccctgttgtttttcaggatataactttgtgctgctgatgatggtgttaagtgccggtgggctcggccttcttatataagtataccccgtctttatacttcttattgaggatggtcacttgagctagcatatatttcaaacttatacttttgtaatcactccgataaaatattataaaatttttgtaacctgtaaaatttggtaataagatttccgctgcaaaaatattgatgtgtgtgatttgtgttacttaatcccgcggttctggttgtaagtggtttatccgatgtccttggggcactcggacggatcctgttaagttatttggtgcacatgcatagctgtctgaggtctttgagacaaggacaggtgcatgtgggcccaataacttgggaggttctgccaca

SEQ ID NO: 9179 - DNA, 678 bp, Zea mays
gcgtttcccacaggccacaccaatgcactccaaacctggtccggacaaccgtacgcgcgtcatggaaagaaaaaaaaacacacaatgcacatctgtagatcatgtcccattggtgatgttctgactgtcgtaagggtagcagtagcggtaaatgcagaaattatagtggcttaagcatatacgaaaatacactgatcctagcaagaagcactcaacaaaccgacggaaatagaagccatgaaagtaaacttccatttagagtaatgcgtaggcgaatacaaagacagcatcgctttttttttacaggagcaaagaatagggcatgaacaaaacagaaaatgggaaatgctgtaggaatatggatgaattgatcattgtcatatacggagtacatactagtattccaaagagagtcaaagctgccacagcaactgagattacagggggtggtggtactacatataacattaccagccgttcattaagcttacaacatcatgaacataaaaaagcatccacaatcctggcaatgccagcgagaaatcgaatggacataaccttaataaaacagaggttcatgacttagagcaaggatcacgatatagttaccatgatataggaggaacagaatagaacagccgacgaacaacccagacaattgaagcatgaactcttcaa

SEQ ID NO: 9180 - DNA, 749 bp, Zea mays
actctagagatccccctgcgagaggtaggtgaagtcgagcaggtagacgggcttggccatggccgccagcacgccgcgcaggatcgcctgctgcgggatcgggccgcccgggtagggccccgtggcgttgagcggccgcgtctcccccatgcacgtcttcttcggcgacgcgccccagtcctggcccctgcaccgacacggacgggctgaggtgagcagtgagctgatgctgctgatcgatgatggcgatggccatgcatggcaccgcaccgacagcagcaggggggacgcaacgcaaccgccgtgtgtcagtcggtcagtgcgtgcgtgctgttgccatcggtgcaaatgcaattatgcacgcgcgcggttcataaatccggctggacggacgtggttgcgacgcgacgcgagcatgtgaagtgtctcaggcggtcaggacgatcgacgagctgggctggtgggtggctgaggttgtgctcgttgcagcggagaggaggagcgaggacggacatggggccgcttgttgtgagcagggtgaatgaatgggacagagactgtgggtggcgtagtgtgtttacctgtagtgggaaggcgagatcccctggaagaagaccttggtgtcggtctggacaaggttggcgtcgacccacctggcccaggtgtgcagcgccttggcgaaggcctgcgtgcggtccatgtccttcaccaccgtgtcgcccacctggatgtagtcccagggggatctc

SEQ ID NO: 9181 - DNA, 723 bp, Zea mays
tgattgtcacggaagatgtcgctagccaagaaagaagaggtactcagaaacttcctcctctgaggtcaattctggttgtttgaacgtctctttcacatttgcctaaaatttttgggtgttctatgagcaggtttgcagtcaccgacttgtaccgcgcttggacgagcctgcggttggtgtgcctattaagaagaggccatttttcttgtctgaccgatcggttgcatctgccataccgctctcgacaaagcccccatctccaacgaatacaatgcctgttgctgctacagggtcaggctgccgcgaggaacccttcttcaacatcgctaactcagacagaaatgtcatcaccaaaggtaagggaatccctgacactcagatccaagaccatgtcaacacgtcgcttactgcgctatccatgaccaacggcaacggggtgctatttaatgcatcaagtgagatcccttctattgcagacagtgctacaaggacgtctgcacccgatgatgaattgcaacttcaaaattttttggctctggatttacagttaccatctcgtcaaagtggcaaaaataataactatagctctcttaggaaggatgagaaactgggccagagtcgttcggaacactacaataacgttcctgttgcaaatgaaatcaatgcttctgggaatagtattgttgggagattgcctaacttggatctgaatatacctccgga

SEQ ID NO: 9182 - DNA, 778 bp, Zea mays
gggaacgactctagaggatccttttgtaaatcttcaatgaagttttccgaattctctgttttgatcaccacatcatccacgtaagcctccacacgcttgccccagtgatcggctaagcatgtttgaatggctctctgataagtcgctccagcgtttttgaggccgaacgacatggaggtataacagaaagcaccaaacggagtgatgaacgccgttttttcctcgtcttcttttgccaaactaatctgatgatacccagaatagcaatctaagaaagacagcacagaacatccagcggtggagtccaccacctgatctatcctcgggagcccgaagggatcctttggacaatgtttgttgagatcagtatagtcgacgcacatgcgccaatccactttattctttttgagtacaagaacagggttggctaaccactcggggtgtaatacttctctaataaatccggccgcgaccaagcgagctaactcggcgcgaatggcctctctcttgtcgggcgtgaaacgacgtagcttttgccggatcggcctcgcctggggatagaccttcaatttgtgctcggccagttctcttgggactcccggcatatccgcaggttgccatgcgaatacgtctcggttatcttgcagaaactggacgagcacgtcttcctatttgtcgttcaaactggagctgatgatggcagttttgtgctcatcaacgaaccccaggttgatccttttagtttcttcaggtgggatcctctaaggtcgacctgcag

SEQ ID NO: 9183 - DNA, 659 bp, Zea mays
aacagcaaacccccaaaccaatctccaatgccaaggtcagccaagacgagtcctgatgatccgtgctgataagaaatgagccgtttgaaggaattaacgagaaatcaattaataattgtagcggcggtctaagatattcttacattattcatatttctgcaaatagaagcaagaaagaaacaagaagtacgagttggctgcattacatgagtacgtgtttgctcgttactataattggcagaatatggatagctctaattggcagaattacccacgctgtaaacacaacctgacacatcaactaggcatggtctttataaaaaaaacatgggtaacaccgctccataaggcatgctgaaaagcgaaaggggactaattttgaaagcaagcacatttttttgtttgtgtgaggaaagcacatgatattttcctcaccagggccaaggggtcccatagctcggcagcatttgcggcgccagtggcaaccagactccacactgcaatccaccggacagcacactcatgtcagtcacagctcacaggcattccgtcgaacagacaacgcgcgccagcaaacatttcaagaacacgggagaagatcggagctaccggccacggaagccagagggatggggcgcgagcgcctcgccggcgtcgca

SEQ ID NO: 9184 - DNA, 703 bp, Zea mays
tgtgactgacaggtgagtgcacgcatgcatgtgactgtgcgtgtgagtgatacgatcgagctgagctgtggagcctgctgctggtactggtaggcaggcagcagtggtggtgagcacacgatgacgaggtcatgatgcggcccgctcatgtgactgtgcgtgtgacggtgtgagtgatgcaactgcaccttgcaatccccagcgctgcgtacccagtatatgctatctgcctgcatatctctttcgcctccggcctccagaagtcctacaagtccatcaggcaggctacgagtttttcgaatggaattttgcagttccaacaaggaggtaaaaatgattactttaatttctctgtggtaagaagaatttttcaggaagtattgagtttggactttggagataggagtgcctggctggtatctagctagcttttcctatctcctatgcatatgcatccagcaagctttctacaagcgcacgtactatctacacgtaccccggtcgcggccggccttatttgatgcagcacgcgtgcatgcaccgcgcgccggtgccgtgtacgtgcctgccggcgcgcacatggatggccacgcacgacgacgacgacgacgcagggcaggcagcagccagcaggcatcaggcgcggacacggccggtcgatcgagcgttaggttacgtgcgcgcgcatgcatatacttggcaa

SEQ ID NO: 9185 - DNA, 863 bp, Zea mays
tgccgtggcggaaggcggcgccgcgagcggctctgaagccactcgggtcagagagccaggcacgctgaagctgccagcgccatggacgacaaccgcccttccctccgatcactgagggaaggagcgggccaccgcccacgcaggggccgaccccaactcggcacactcccctccccagccctggtgatgaaaatccttgaggctgagggaggggcagaggccgcagcccggtttgctttcccccgccatcaagctggaggtcaccatcttgggtgaccgccggtggaggggtgcagccgggctgcatgatgaaaatccttgaagccgaacgatggctgaaaggtaccaactcccacggagttgcgttcctccaacgacgaggcggaaagacggcgggtatcccccatccgggggcttggaaggtggaaagacacgatgcataagggagcgtgaagacatggtcgccttccgaaaggggtcaccctccttttaaaggtgactctccctacttgcgtccccagccgtcgtgggctgagtcttctccaacacgctccaaggtcctccccctacggcgcgggggctgggtcccacacgtcatgcaagccggctcagagcagaagaagccaaaccgccgtgcgcagtgcatgcaaccgcccagcggttacaagcggctctccacttttgcccagaccagcaggcgaaaggggcgggcagccatgcaggcggcatgcaaccgcgccaagtgggcgcacttctccgactcccaacacgcccggcatggaggcccaggcccacgcgtcatgcaaccggcgcgccgaatgcttcgtgcatgcagagggatacctctagagtcgaccgcaggc

SEQ ID NO: 9186 - DNA, 705 bp, Zea mays
cagggtgcttccatcccagaagtggcttcatctcttgagcgttggaatccggtgttgcttcatcgtcgtgtatccgagttggaggcaactaatgctggttagtgccctttcttcttcttccttgcctttattcgtggattgttttaccttctgacctcgcttcgtttgattacctcttgataggaatgactcggcagattgcagtccttgaggaaaaacattcccgagatcaagctgaaatggctcaacggtgtgctgacttcgaggagaagtattctcagagccagactgaactgaatcaggtctccgctgctttggatgatgccaacgctctgagttcttctcttcatgctcggcttgactctgaaaaggtaacttacaaaaccgtgcttcgccttatcatgctctttttacttgcttggattctgaatgagttgatttttgtttgcaggaagaaaaacgtatcctcgctgcttctcgcgacaatctggatagattgtatcgagattctagcaattcgctgactatcttggagaggagccaccgttttacgatggaagaattagacaatcagcgttgtaagctgcaagaatccatgggcgaagtgactcgcctcaagcagttgatattggcgaaggatgccactatcaaagagcttcgagtttccaagaaatccattgcccaggagttagaaactgctcaggg

SEQ ID NO: 9187 - DNA, 697 bp, Zea mays
ctgcgattagatgagaacatggaaaatggtactgcctcggtacgccacaagtacatgacaagtcattaaggacaaccacatgcttcctcgactcttgtgactcgccgtcggaagtagtaccagcttgaaggaatacctcatatgcccctgactgtaagtcaaaacaatcaacagtgtgtggcagaaccgcccgaattattccagtttaagtgcccaagtcgcacccttagaggcggcaacacacttaaatcggaataactcgtcagtccctcggatctagtccgataaagccacttatccaggatcgaataccactagctcactcgaaggtgaggcacagagaaatacaataaagcataataccacaaatttaataagtatcattagtaattacattatcggagtttcagaaataataaccataaatttttaatgcagcggaataactaacggagaaaaccgagtaacatggcgaaacctggccacgctactcctcctggtcctctcctgcggaagaaataacccactcgaccgtctgtcacggtggcagggatggaggccaagtcacaccatcaaccaaatcaaggaggtacctgcaaaaattatgccacaagcaaggctgagtatactaatactcagctagacttacccggtgtgaggagtctactcctctacctctagacatgcaggggtacga

SEQ ID NO: 9188 - DNA, 1434 bp, Zea mays
cgcaggagcgggggaaccaccctcctggtgatggcgctctaccagctcagcacgcaactccgcaatctccgttcgagccctgcttagctcgtccagagagtggtccagctccgtgttaagcactgcgactaggttgactgtgctgctcaacctagggttagcctcaccaacaggtgaaacaaccacactctctgtgctgccagtagggcggcgggggtagtaccgaaggttaagaccgtcggccacgccaccgaacaaagaacagtactgagagagtgcacgtcgtgctgcatcctgcatagccgcctctgcagtgtccctctcggagatggaatagtgctccgaaacagcctccgcaccccggaggtcatcctccggacggcgaactaggcaggtagcctcccagcggtccgggtacctcccgcgactgtgctggtagaccacacaacgatactcgatcgaccaggtgtgccggtcaaaagcctggcgcagcaaggtgtcgagtgcgtcgtggaagtgacaaccgcgagcggcgtcacgggtgatgggtcgggcgacccatccttccgcctcctgcggctcagaagactccgtgctgtggtctgagtcgtcgtcgtcggggtctcctccatgatctccaccagtagctcctccaacagccgggacgtcccgcggtggtgcagggggcgcctccagctgggcaacagaggaacggggcctcacggtctccacctcctgctggggtggggaggaagagccctgctgctctctgtgctggcgccggcgttcctgctcctcacgcagtcggtggtgcagcctctccaggtgactcgactgaccggacacggtgcggtgcagaggacgctccgcaagtcgagacggcaggaaaggaatcaccgacttacgtgcagtgtgtctaagacgagccatctacaaaagacaccgtaagcataagagtaagagcagaactaatatgacaagtgaataaaccaaagatagaataagataaaaaaaattttaacaaggtataatatagtatatatatatgtagtaaaacatagggttggtcgaggtgaccgactttttgaagtaacatcagatgtcaaggtgagaggggagggtcaatagtccttagtacgaccagtgctactctaggtcagcggtcctacagtcagcatgggctttgataccacttatgtcacacccggttttggaaggcaaaccgaatgcgaactatgtacgtgccaggatcagaactcacgtacacagcgattacataaatgaacatcatcgcacaatgctcgaataataacataaaagagtattaacttattacatcatagagtcatagacatccacatagtcattgtcttaacaagtaaatcaaagtgctaaacgaaacacagtaaagataaagcctccacaggcaggggt

SEQ ID NO: 9189 - DNA, 681 bp, Zea mays
tcgaagttttggattgagttatcttctagttgttggagaatgacaataaactcatataaatatgtgtggactgtggagtaccgattttagattttataagctagttcgggcatgtgtgcagtgaatgacaggaccaaaccgatgtcatttcaccagttgatacctgcttcagactgtggggatcatggaatattattcaatcacaatggttggcttggtcagaatcatatcactggatatgggaattttgttagatcaaccgttgcgacaatacaatggtgtgtttacatatcacctttttgtgtatagttaaaaaacctggagtaaaatacacaaaagtttgtgtacaggtaatttgtgtaatacctcccatttgtgttttttataatccacattttttgctgttataacaccctcaatgcttgacatgttctcggtgaattgccaaattcattatagtccaaaaacagaacaagtttcctcagattatattattcaaatgcatggaactttggtaaatcaaattaccttctcaactcctagatactctgtatcttaggataactaagttatagaacaagtttcctgacattatcctcgatgaataagttgaactgttctaggttgatcctgccaccccagcagcttttttagtttcctggtgtatagtgtctgtcaggg

SEQ ID NO: 9190 - DNA, 725 bp, Zea mays
acaaaatagaatatttacggatgaacaactcacgcatgtcacgtcgagggacggagggagacccccttgttgtcatgtgcatataaggctatccgcaaccgttacccctaaatttttccccctatatcacttttcccccctatttttccccctattttccatctcccgcagcggttccccctaaatactccccctataccccactaccactataaaatatcattttctataccaactattaattttttatctactaacaattactcgtggacccatagcacagtgtttagggtgatgaacagtgacacgctagattgaggagaggagagaggaggacggtgggctaggaggcggtgcaggggcaccgctgcgcgcgtggagcgccccctgcacgcgtcatgcaaggggagggggctgcgtaggggcagcctttgcggtcagcctaagcagccgcaccgcacggggaggacaaggaaaatgggacccacggccacgacggacggcgacacgatgcgctcgttttgtcgcccggccggtgcccatcacgctttttgtgcgctctttctgaggccagagcctacgacgcctttgttggcacacttggcagcatccgtcttttgagaggaccaccacaccgcccaaggccatccaattccgaggcaccatctatcacctcacctcacatcagacgtgcaaacgtgatgtgggggcggcgacgtcgagca

SEQ ID NO: 9191 - DNA, 733 bp, Zea mays
tgcatatgccaatgcaccaatagcaagcatagcctcctcatgcactgtggcatttcgacatgcgaaaactctcaaaaacagttccatcatctgatcagcatactgcaagaaagagtacttagttgactccatccctcctaacttttgaataatgacctgcaagcaaccacaaaggaggccctgcagttcgctcctcttctccctctcatcagttgacagcttttcagcttcaagtgtctgatggagttccaccatgatcacaggtactaactgcataacaatagcagccgtctcctcagtggagcacctgacaacttcatttagggtctcatatgctgctgttcgcagccgagattccccagcatcctccctgtgagtgaccataagaaggttctgaacaatatcttgaaagaaaggggatagtggcgatgcagacccagaatcaacatagccttgtgcaagaaaatagagggctccacaggccttttcagccacatttgggacatccttcatgctgtgaagcaacacagtaagtatttgctgacaattctcggccgtaatgataggaggagtttcaagcgctgaaccatgaagaaactcaaagattctcccaagggtccaagcagttgtgtccttcacatggttacttggatccttcatcagcgcggacagcatgaagcccaatgcaacattaacaagaggagccagtttatcagggggatgctctagagtc

SEQ ID NO: 9192 - DNA, 631 bp, Zea mays
tgcatccacaccaaaacctggcggtagcccaaagaaaggtgaggtcaaacctgctgtcgacccagttcaaactccagccacaagtgcagattcaccaaaatccgagcctagtgccccaccactttctgagaccgaagaagtagacaacatggcaatcgatgaggtcagtggtgatgctgcagagggcgcggaagagcttgaccctgcgctcgaggagacgccgatggaggagacgatccgtgtgacgcgcgccaagctaaggaggcgcacggccaccgaggattctgctgggaattagctgcatgccgttgttttccctgcacattgtattgatctttttccgagttttaggctcacatgttgtttgctggaatggagatatgttgttgttcacttggttcttgtgacacagagttaattatcttatttccgtgctttcttagtacctttttgtgtgatttaagttgtaaataacagttcccctccgcatttgtatatagtttagcggcatgggcaacgaatgcctgtaattgcaacattacacgcttcaatctggtcactccttgggtatcttctcaagatgtgtcattcaacagttctcattcgctggggcctggggcaaacaagcgca

SEQ ID NO: 9193 - DNA, 743 bp, Zea mays
cgaattcgagctcggtacctctgcctcagcccagccctgtggtttcgcacttgccattgcttataagtttcaggccgttccaccctgtctgcaccctcacaagcaatcacattcagggcaaatgtcccaaagatatcccgctcgatcagcagccgttcattattgtccctagggatggttgcatcgatcatgtcaaactgtgccgagaagaagaagagtgcctctcggaaccgtgtcaaaaagaacggtgcaccatatgttccatttacgacagtgtggacgaacacattgggccgcatctcgcggatgttgttgaggaccgtatccctagggctcgggctgtccaccaaaacactctcgtccatcaagttgccgatatagcactcactgttgacagcaagcacctcatctggatcaatattgagatccttagcacgaacagcctcccactttgctgcaataccgcggaacttgaatggcacacccatctcacgggcaatgttgctgagacggcggcctgtttcttcaatctggtgtgctgggcgaaacccgggttgtgggacagcaatcgcggtgaccctcacctctggcggtccaccttccctccttgctagtagatggaacagacctggatactggaatccatgctgcacaccatactccacaatgtgcaacttgctcctccctgccacggcattgcaaatggtcatgttggagaagatgaacctcaccttcatgaagca

SEQ ID NO: 9194 - DNA, 709 bp, Zea mays
tggaggaagcggtggcactattcgacaggatgctggaagaggggttcaggcctgacgatgtagccctggccgcggtgctttcatgctgtgcgcagctaggggcgctggacaagggccgggaggtgcatgggctcgttaagctgagcaggccccggccgaacgtgttcttgtgcacggggcttgtcgatctctatgccaagtgtgggtgtgttgaggctgctagggaggtgtttgaagcatgccaggataggaacgtgtacacatggaacgctctcattgtcgggctggcaatgcatggccacggaacggtggcgctggagtacttccaccgtatggtggctgatggaattcgtccagatggggtcactttattgggggtgctaatcgcttgcagccacgctggccttgtggacttggcaaggcgcatcttccgcgacatggagagtgtgcacaatgtgccacgggagctgaaacactatgggtgcatggcggacttgcttggtcgggctggactcattgaggaagccatgaacatggtcaggaagatgcccatggaaggggacaattatgtatggggaggtattcttgctggatgtagaatgcatgggaacgtggatgctgctgagcttgcagctcggcatttgttgcaactgaacccagatgacagtggggtgtattctgccatggctgggatctatgcaggggtacg

SEQ ID NO: 9195 - DNA, 733 bp, Zea mays
cccccgactctagaggatccctttgagagcacagcagaaacaagcagaatcttagaaagaggaatcattgcataccaccccatgtcagtaaaaaaattgcggagctttggataacattaaaaaaccataaaggcgctgatccctaataccattcgaggcagaggcactaaagaaagaccaagcctctagggtcaaatgaaatgaaatgaaaaaacttcatctgagctcactgaagtgaccagcaaaagtaaccgacgacctggcgaacctagagagagaaaaaatagcccaaatcagaagacctccttccggatgggattccgagggaccgaatcgcccatggcacacaaatgccgaaccctccacatcagaagaagcaaaaccccagcgcaggctgcagcactgcagcggacatgcgaacgaaccccgcaaaagccgccagacaattcccgtcagagtccagtccacgattccgcgcaaaggcgcgggggcttcacaggaaccagaaccacgaacccaagctgcggacgacgaggatttggaatccgggaccccgtcgcgctcggatcagataaaccccgcccaaatcccggaaacctctgcgaccacgcgaaatccgggcgaagattccgacgcgtgcgcacacgcgtatccggtatcccaaaaccctttctaaaaacgcggggatgcagcggcaacatcaacgggaacaacaaagccaccctccgtgtca

SEQ ID NO: 9196 - DNA, 670 bp, Zea mays
ctggtacccctgcagttttaacattgcactacagatcatggagatagcttaaaaactaatcacagtatctgaggctgagctgctaggctgtttattttgatgatagtaatgatttgcctcaatggcacacatattgacaggccttcatttctctcgctgtaccagtacctcagaaatgtacaacttgatacctgaaatacaacctctaaatgtttgcttggacaaattaaaatcatataacctaagtgtgcaagcatgattctgtagcgaaatcagtgaagccttacttcattaatatcaaaaggttttattcaatttgctattagtcaataactcttattttcctgcaggtaaaagttattcaggattctagacctatacatgacaaacttgttgattctttcttgaacaaatttttcccatcaggttatccatacaggtatggagttcctaggcttgttgctattctagataattctgccgggatacatcctattatgctaagtctctgggtctcttctattaatcatgcagtgtgaatgaaggttacttaacttataccaaattccgtgtgctacagcatttctcgagtgctatgctacatgtgctatcaacacaggtcagtaaatccttttcatatgttgtgtgtgtgttgattccatgaattcca

SEQ ID NO: 9197 - DNA, 671 bp, Zea mays
ctcggtacccctgaattttagagttttcaccccactttggagcactataacttttgatccatgaatttttgacctagggtttctgtagcaagtttgtagagttatgttttatgaacaggttttattaactgaggtcggtctgttattatttggaatcatgagatttaagggagttagcagagaggcacggtgcaatcggattcaattcagtttgctgaatttcagaaaggcagtgagttcctctcagctttagcactgtttagcttctaatccttgtgcctttgatctatgggtattatggcaaacttggagatctattgtaggggaacaattcctagtaaacattatattcctatcatcgcttcaaactggaagcaaatcgtgctccaaaccgcgctgtcagacatatggtacctgaaatttgttctaggttggggaatttggtgttggggctctctaattcctcacgtagtagactttgaactttgaaaatttcacaacttttgcttttgggattttaaaggtggttattcaaatttgaaaataattttgaaagattagttgggagagaagatcagcaacagttcactgaattcagctttctgaactgaaattcagttcatgcactctattttcatctgctccatcttgctgctctttacccctctaca

SEQ ID NO: 9198 - DNA, 761 bp, Zea mays
tgcgcgaattggctcccagcgccgcaaacttggttggagtttggagctgttgccttgccttctcttcttctgctagctctgctgctctctcctgtgggtggatcttttccagccagccacagccagccgccacttgtgtgctgtgcctgtgcgcacgtacaggtacaggtacaggctgaggatcggatcggctgccgtcaaatcgctctggatccattggtggtggtggtggtggtggtggcctggtgggcagggccagcgtgtctgccattggcgcgaggagatcggtcgatggacacgccgtcgtgtctgtttctggttcgcgtccaatcggccggggcgccgtgctggtggctgctgctggtgggcgctgctactgctgctgctacaggtcagtgacaccgaacgtccgaaccccatctcatccatccctcgttccagcgaaaaggtcacactgattttttcccctccttcttcttcttattgaatattataatatttttcgggaactttttagaccagagaccagagaagcggcagccggcccggcccaaacaaacaccgaaacaaggagagaaaaaaaaagagagactgttatttattcctaacctaacctacgacgcttccaactacggtggtaggttacgttgggccggcggcccgcccgcgtagccgccgggaaaaccgcgtattgggccgccatcttctcacgactcacgggcacttgggccctcctttcttggtcttccaggggtaccgag

SEQ ID NO: 9199 - DNA, 693 bp, Zea mays
tgcaggcaaaagatcactgaaacacaagcaaaattgacacaaatagtacaaacataatacacggggggataatattgttcctgcctttagttctatgctaataacctgaagttaatattacaattctgcaccaaaaacctcctcccactatttcccaaaactcaaaagggatccagttgttccctttctttggcataaccaaggaaataaaccatcaaaccaacaccttattccggggatactaatgacctctaatatatgaactcatcaggtatattcacatctgatctgatgctaaccagaaggaaccgagcggaacagacataaataagtaagacttgcacctgtttctcttatggtggatactggatcttaaaggagcatatcagacttggcaggcagtctcctgtagaagttgaaaggcactgagggcatcctgctgcggaaccggggatgtcgcagcaggtaaagcatggctatgaccatcaaaacctggaacggcgtcacgtacagcacaacggcgaccaccagggataagaaaatgaagatggcggtggcccgagggtccctccagctcagcaaagcatgggctctctcgccttgtgtcgccaggtccccaaccacagcctgcacacgacctccaacgctcctcagcctgtcatagcgcattcttacaatttcaggggtaccgag

SEQ ID NO: 9200 - DNA, 740 bp, Zea mays
tgcaagcactcggaatgcattgctatcagtaagcttggggggttgcccataaagatatgcgagcgcaattgcaattgcatctgaatcgacattggcatcatctatgtgcaaaaccactgtgggtgctcccgactctctccaaggaccatgtagcatattccttcaagaaattaccatacagaagttgttaagcattttacttgttttaatttacatgaacattctatgtgcggatgtgccagtagggaagtaatgtaataagggaaatatgtgtgcacgacgctaaagggaagggagaaaaactatgatttcatttttcatgagccacactattggttgatgcctatacttccatccaaaagttctgaacttgaaatctcaacagaaaaaaatagtgcctgacttttattaaatcaattttagcttcaatagcgattcttggcataaatggaaatctggaaatcataaggcaaactgaacattgaaggatgcaatatgatatatacagagtaaatgaaaatctaacatgttcggttaagagtgtaagatttcaatcggcatgctatttgcaggctgttactttctggggggaaaaacagaatcctaatcacttgataaggtcatatacttagattgaacgttaggaatcaaagcacatggaaattttacaggaaaggggtggagacgtcccaaccaagacaaaaatgtccacacagaaattcaattaagtactttgagca

SEQ ID NO: 9201 - DNA, 873 bp, Zea mays
tgcggaacgcgagtggggctgggattggggccgggagagggacagtggcagcgcagcaagcaactgataaggccttgttcggttattcccaatacacatggattggatgggattggaaaaaattcttaagaaatttgacttgtttgggattcaaacccatccaatcccactcaatccacatggattgagagctaaccgaacaaaccctaagttgttgcagagcggctcgcgcggggtgcgctagaagaggacagtgcgccattgtaaagcgaccaatggcgggcgggcgggcgccgcctttttcgttatctgattgagcaaattttcaagtcatggcgaagacatggtaggaagaatagctacgtagctcgcttttaggatgtagccggatcatgctgtccccttgctagcagcaacttggcatctccagactccagtatgctgccgtcgatcgcctttgatgcccaattctcaattcgggttagctagcttgtcaagttaaaaacgtgattggctgcatattaagaatcctgggcggcaatcatgtttcgtagtcgccattgcttaggccctgttccaatctcgcgagataaactttagcagcttttttttagctacttttagccatttgtaatctaaacagaagagctaatgatggtaattgaagctaaactttagcacttcaattcatatagctaaagtttagcaggaagctaaagtttatcccgtgagattgaaacggggccttagtgccaccacatcataattacattacagcagcgataggtggttgggtacttttgatcggatgaattccgaactcaacttttcggtgaagagaggaattagtactggatccgtcgaacccacaaa

SEQ ID NO: 9202 - DNA, 909 bp, Zea mays
tgatcatcaagcaagtccacggggaatgtagctgcaacgagcccaggctcgcagcttacctcctccacgtaaggaagctggaaaaagacttcacggccctggaactgcaacatgttcctcgggctgacaactcggcggcagatgacctctccatgagggcatcaacttgggcacccgtgtccgagggcgtcttcgaaagatggctgctgagacccaccgcccagcctgccaaactgggcgaaggggggcgagactagcacctcgaagctagcgggccccggtggcgtcccatctacagagcccaccaaagactgtgtgtgctacagagggtcctgccaaccttgtagcgccacagccaatatctcagagtggtattgatgcatggatctctgagatccgagactacctgaaggaaaaaatccttcctgaagaccatgtgtccgcagagcgcatagtgcggttggctaaacactacacggtggtagaaggggatctctaccgccgtggcgccaacggcattctcatgcggtgcatcacccaggaggagggtcgtgagttactcgcggagatccatggaggagagtgcggaagtcattcaacatcctgcacactggttggtaaggccttccggcatggcttttactggccaactgctctccaggatgctggtctctggtgctctaccttaattcttcgacaactatcacacatagccacatgctctgcgatttccctcttcattccgtaccaccagaatttcttcttcagatcctgatacatcttctcactaccagggtgaatcgaataggctatctcatgagcttccttgagaatcaactcccgaatggattggacattgggaacacacaagtggtctttgaaccatatcacaccttctgcatcttcccg

SEQ ID NO: 9203 - DNA, 663 bp, Zea mays
gactaaatgacgagacaaatttattaggttcgtcttatcgttcaatcctcatatgtgtaattaattttgtaattagaatatatttaatacttctaattctaattagcattcaaacatctgatgtgacagggactaaaatttattcaggggaaccaaacagggccttaatgcatctctcttagatcctagttcctgaacatgtacaaaattgattttttaacaataattttgaactgtgctgttggtggggctaatgtatacgtttctcaccattttttttattttaaatagtatctgaattgagagctatgtttgatatggaagattgaaacattgttagaatgcaaacacagatagctttctgttgcctgcagtgtaaaatatttcattatagatcgttaagagcatcagtgcatactaagtatcatgaaatggtcagtttatattactatatatattgcattattagtactttactacttggtccatcacatttagtagaatttcaggctttttccatggaacctgtgtgcactcataattttcatatataatatcttcaaaagtgttatcaaaataatttgagcatgttgaagacaactattttattacgctgcaggatcaaaatcttacagggaagcagatgatcaactattgttcaga

SEQ ID NO: 9204 - DNA, 1397 bp, Zea mays
tgctgaaaaacataaataaatctgggtgaatacactaggtattccgcaagcccacccggctcccgtaaagagaaagtgacctatattgtacatgcttcatatggtggagttgaagtcactcatacttttctcagagaaaggcagtactcaatgtttagggttttcccaagacaatagaaataacacttgcttgaccaccactgagcttcccgctcccgtggcaccattttcctttccagagacacactcacacacacatatttccctgttcccagttgtagtagaaacactaattgtcataccataccagactcgtccataccagtggacacggactattcgaataggtttagactctgcgcagaggggtacactttacccactagtccggctctgcgatctcatggccaatgagatccgaatccgaaactctttccttccttgcacgtcctaaccttaacggttataccggaaggagtcaggccaccaccatgtccaaaccggacaaaacattccccctccttatcctcccggtgctaccccagccttcataaccctggggttggaccgtacgagttcagattgagtgactgcccacacagcctcgagtggttgtactttttatgagtacaggtagtgaaggatgacaaaccggtccttatacgaggggacaatccttctgctcatgcctaaaccagctgagccatcaccttaggccctcccctaaaccagagagtccctgatcatccctactcaaaggtgataagggtgaaaacccttaattgtacacattttgaaaagcattttcttttgaaaactcacaccttttctcaaatcatttggaacaaatatatcaaggattgattgcggcaagcggctgggtggccataataacttgtctcaaaatcgtatcatgcataaaataacaggctgagggttgtggttgaaaaacataggtaatttatgcatcaaagggatccagtgagcttgccgtgcttatccggcaaagggggaagaggagctcatggaactggcttctagctccactgcctggcgtagacttgcagatctggcctccatgagacggcacgaacgctccgataactatgcaacatgaacaagaaaacatacaaaccaacaagtataccaacaaatatttagtatagtggtcagaatagcgatgtatggatgggtagagtcttgagcagaatatgtgtcatgtggtgttgagatactgctggtggtggagcaaaggtgcttaccaggagggtggactggagacgaagcgacactatgcgtgtagccggcagagcggagtaactgagtgggtggggtgtttgccttggctaagggtgttgagtgtgtgaagtgggagggggtagcggggtgtatttaca

SEQ ID NO: 9205 - DNA, 652 bp, Zea mays
tcgagctcggtacccctgagccacaccttaggccctccctaaccagggagtccctgatcatcctactccaccaggtgatgagggtgagtatccttcatcgcactcttttggaaaacgtttcacttataccccttttcacttgtcccatatcttttaatcgaagtaatagttaatgcgggctctctcatgcttaccatgcaatttgattcccatcccataatccaggcttaggtagtggtagagagagataggtaaataatgcatcaagggaaagatgaacttgccttcgtcgaagctttcctggcacaagaggttaatctcggaagggtcgggttcttgcccttcttccggagctaagagtttcggaggatcggatccctcttccgctaattaaacatagacaataacaatacatcaaacatagtgacctttgtggggtgtgcaaattgttatactttattatttttgtgccttaataatttatttagacaatttttggtgcataaaatattagtatctaaatatatatgtgaaaatgagaaaagaaaataggaaaagaaaaagaaaagggattctccatccaactgggccgggggggatttaggcccacaaggcgcgcgggcgcgggcgcgcttgcggcccagccggccca

SEQ ID NO: 9206 - DNA, 867 bp, Zea mays
cacgcattttaaatgtagggttagcttaattccttagggcacccccgggctttacccctttaatgcttccgggcttgtattgttgtgggaatttgtgaacggaaaacagtttctcacagggatcagcttaggaccattattaggcgtttgaggctcgggacccctggtaattccctccgacagcagcagagtttttacttccgttgtacatgttccttttttacaatattttttttaagaaaagaaaaaaacttaactttgtttcatggtgatgcagatatgttgattgggaagggtggaaccagccaagttttcaaggcacgactcgacgatggaacgttttgtgccgtaaagattctgaaaccctcggtcgatgcagtacatgagtttgttacggagatcgagaccgtgagcagcctgcagcacgagaacatcgttgcgctgaggggattcagcttcgagaactacaaccttgtgctggcatacgattacatgccccaagggagcctggacagagctcttcacggtaagggtcaaaatgtaaccatctctcgctagctcgcctcttatctgtatattgccaatttgccattgatcttcagggaagaagtgtggcacggagtttcttgtttgggagagaagaattaagatagcgatcgacgtcgcaagagcagttgaattcctccatcttggcggtgtcacccagtctgtgatccatggagatgttaagtcttcgaatatcctcctttcagaggattttggggcacgggtaaacatttgaattcagtttgcaaatacatggataatccaatttcaacggtggtcaatatgttaatcctggttgtgacatcaccacgctttggaatt

SEQ ID NO: 9207 - DNA, 670 bp, Zea mays
gttagcgaggggggttggcaatcgacagaaatcaacccagggttttggtcgtgccgaggcttctacaagatgggcgcttgtccagtccagtcagtccagcctgacgccgagccggatacacatgggctcggtccggtgaatttgatcgagtagctcaccagccacgtgccgtcacgtgcgctacctgcattgagtcggaagtccaggtcaacgtgaaatgcgcgcgccacagccacagccacaccgtcacgtccaagcagcaagcactatcaagccacccaatgtgagcagataagcgctgtcgctagacgctatctaatctaacctgcagtttgtatttttttttccttcctcctcctgatggtcgctgtcactgtcattgtcacaggcgcggtaacgtagcgagtccgatctcgtctgtcttcgcttcgccacgaaacgagacgcatagcgccgcacgccatgtgtacccagcaatcgaccgcacctagcggcttagcctttgcgtgctcgcgatgcacgaagctggggacagtcgttgtccgtctcggcgcggtgtagtgtagtacccatgcctacgttagcaacaccgccgcccttggtaatttaggacgagcaacagccgcgcgggctggcaggaggctccaggggtaccgagctaacggaaggg

SEQ ID NO: 9208 - DNA, 667 bp, Zea mays
tgcagggaccaactgtaggtcgccgaatttttgacacacctggcaacccttgtagtacttgaaacaatcagctatcatgttaggccaataaaaacagaccttcgcaacagccatttcatctttggagccgattggtgggtaccacaaattacttcatgtacttcggccatggccaatatagcatcatctgggcccaagcacttaagcaggacgtcgttgactgttcggcggtagagttcatcactcatcaagacatacttgaaagctgttcgccgaatgttcttatctgtcctgatattgggatttcgtaaataattaagtataggtgtcctccaatcacttgcatcggcttcattatcagccgattcaattaagagaacatttctggtaacctcggacggtccggcgtctcgacgcggacggtccgcgacctggggaattggccctgcaccggttatcagattttcagtgttgtgaaatctccctcgctttatccgataacctgatgcatcttgtgccaaattgttagctctatgattctcaactctagagatatgccgaatactgaattcgtcaaaagaatggattatgctccaacatttttcaaggtaactatttagagtaccatcaaagcattgatattcttctaacacatgttggatgacca

SEQ ID NO: 9209 - DNA, 661 bp, Zea mays
tgttagtctgttactgttaggtaggcagtgacctcgacgatgcatgccgcgcgctccggttcagcgagaattaggtgctccgcagtagtttcggcggccagctactagctaggtgcggtgtttctgccaaacatttttccgtgcgcggcacaccgccgggttcagtgttccggccactcctagtacttctgtccctgatacaagtgcttcagttcagagacggtgaaaacgttttcctgacggatttcgtgcggaacagcaggtcccaatgcaagttggtctgtcagttactagtcaacccgagacagtgtcggtgtcagcttcagcagtgacaaaagacagtggattaaattttttgataaaatggcagcgggtgaagagaggagagagtggcagatactaacagcgatagtatggctgttcgtcagggagagagaaaaaaagaaagaaagaatatgatgacatgccagtgtggagcagacatctggttgggttgggacggtcaccactggcactcacgccggcgggacgacacgacaggcttgccctggccgtcatgccatgccgcgcaacagtacggcgcgtgcatgcagcagtaacatgcacgctgctcagcacgtcgccgggctatagcgtccacgatccacgcacgcatgtggca

SEQ ID NO: 9210 - DNA, 705 bp, Zea mays
tgcaggtactctagtagtgtgccctgctagtgttcttaagcagtggtctaacgaattaactgacaaggttagcgaaagtgctaaattatctgttttagtctaccatggtggtgcaaggaccaaagatccacgtgagctggcaaaatacgatgtagttgttactacatatacaattgtggccaatgaagtacctaaacagatggctgatgatgacgcagatcaaaagaacagtgaagaaccctctgctagcaataaaagaaagccatcggcgaatatgcaaaacaaggctaagaaaaagaagaagaaacttaaggactcaaactttgaccttgacagtggtccaattgcaagagtgcgatggtttagggttgtgcttgatgaagctcagacaataaaaaacttccgaactgtagtggccagagcctgttgtgggctaagagcaaagcggagatggtgcttatcaggaacacctatacaaaatgcaattgatgatctgtttagctatttccgtttcttgaaatatgatccgtattgcacgtataactcgttttgcacaatgattaagcacccaattgctagagatgcaattaatggatacaagaaacttcaggctgtgctgaaggtagttctcctgcgtcgtacgaaaggtgataaaaatgtatttttactctatgtgtcttcctgcaggaggatcctctagagtcg

SEQ ID NO: 9211 - DNA, 693 bp, Zea mays
tgcggcttctacaaggtggccaccaacgccttcaccttttctatctggttctcgtgggcatctggcaagactgtctcctggacggctaaccgtgatgcgccactcaatggcaggggctccaggctcatcttccacaagaagggggccttgatccttgtggactataatggcatggtcatatggagcaccaacacaaccgcgtccggcagtgatcgtgcgatgcttctcgatagcggcaaccttgttgtcatggatacagatgggcgtcatctctggagaagcttcgactcaccaactgatacacttctaccatggcagccgatgactagagatactaggttggtctctgcttctgctaggggtttgctctattcaggtttctatgccttctacttcgccactaacaatatcctaactcttatttacaatggtcctgagactaggagcatatattggccagatccattccacatgccatgggataatggtaggactacctataatagtaccaggtatggggttcttgaccagacaggacggtttgtggcaagtgaccagcttaagtttgaagcttctgatcttggtgatgagatgatgaggagattgaccctagactatgacggtaaccttaggttgtatagcctaaacatgaccagtggcaattggtcagtctcttggatggcattccctcaa

SEQ ID NO: 9212 - DNA, 757 bp, Zea mays
aggatccccctgcaaatcagagttcttattgtcagataaaacaggaagcagtctgttcgcaacaacatttactcactcttgattatacctcataaattcaaggcatcgatttcttatcttatgcgaaaccggttgtcggctcaaatcacgtcactaaaagaaaagatatatatatctcaacatctgatattgacgaagccattcttctttctatattttgagcagagtattatgactactacagaactttgaccagtaccaaacaatcggctgcaaatgcatggctacaacggaatctcaacacctcgctgcgaatgccatcatcctcttctctctttttcgctgtaccataacaattgactagtacacaatttaaccaataaatcctcgcagacaaagaagcgggaaaaaaaaaagaaactaagaacatcgtattattcgttcgctgtgaactgaataactccatctccagaagacaaaagtgcagagctataaacgctggagggagcaaagccatggctcctaaaagaggagctgatggtcacaagaaagttctcagtcttccgcggtgccatggccacgaggcgaggcctctgtgtcaccagcattgtcggcagccaacctttcctcaagaaccctctcgccgcgctccctggaaataacgattgagatggaattagtcagctcgtaaaaaagcgataccaagagttgtttctgagactccagatatttctcgataacacagttttggtctcca

SEQ ID NO: 9213 - DNA, 717 bp, Zea mays
tgccaggagtgcctcattactgttgggcggctgtacgcgtgccccagacgtgaggcccgaggcaacctcgggatggaaacagttttttgcttcggcttcacccccatggctctttaccccaacagccgccggccggaacacgtcccccgagagagccgacaactcaagaacaggaaggggcgctgaaaatacttcatcgtccaaagcaggaacctggaccgtcgctgcctcttcggatcttgttgcccttgggacctgaaccgtctctgtctcagcagatcttggcgcctcgggtgcaacgcttgtgctgtgattggcagagcccctaccacagtcattcacaggagcaagagggcccagacgttggtggatgggtcccctcccgaaggtcttctcgccggcgtcgagggggtggagcctcaggacggcgacgatcgccatcttcatgcctgttgtcgttgccaggaggaggaagtggaggggtcccatctgacagtggcttctcgactggggtgacagtcacttcaatactgtaggataaacaccgtttcacatgatccgctggcgttggctcaacaatgaccagattcatggcacattgaagcttctctaactcgcaacaccaagcccgaagcctgaaggatgaaaaatctcttttcagggaagtatccgggtgcacatctgtgatccaacaggaattaccaagtagttgttcag

SEQ ID NO: 9214 - DNA, 673 bp, Zea mays
tgacatacatttaatatatttattgtgacgtgtcgcgattggattgaccggagattcgtcatatggaagaccacacggaaagcagtcgcacaagaacccttggatcaagtagcctgtaaaagaagtgtcgcatgagaccaggccacatgcgtgcatgcgtgggtgagagtgggggccacctgctttattttctcagtcaccatccacgaccgacatgcactgcatgcgagatcggactagaagcggtttcttcttcctctactcagggaaccgccatggggaaaaggtatggaggagccggctactgcgcagaagggcagaggcgaggctgggcgcggccgcgacggctcactagtgggcaaggcgcgtggcaacaacagcggggcgcggggcgctggcttcttggcaggggcgagctgggtgccatggccgcattgctgcgctgtgtgggggcaggagcgcgagcagggggtcgccgtctggggaggcctaggcgcctggcaggcttgccccacgctgctggtcgggctgctatgctgcccgcgctgccgcgttcgtgctgaggtgtcgggccgtcgcgccaggccaccgcgtcgtgccgtgcctggtgaagaccacagccgccggcgggcagggccaggggctggccggtaggggaagctcggcacgtgca

SEQ ID NO: 9215 - DNA, 699 bp, Zea mays
tgcagcaagcactccaacatggctgtgcggaggcgggccatgaagcatctgctggcattggaaccacaagacccgtccacgtacgtgctgacttcaaacctactatctgaatcagcaaggtggcgctcctctgagaacacaaggctagagatgtatgaaaagggtatgcgcaagatcccggccaggagctggacgtttcatggcaacatggtccactcatttttcgcacgggataaatcacacccacagtccagggacatatacgctggcctggatgtgctaatcctcgagtgcatcaaggccgggtacgagccagacaccacctttgttctgcacgacgtcgaggagtaccagaagaggcacttcctgatgtaccacagcatgaagctagcatcaatgtacggtcttctgatggcaggccctgggcagacaatccgcgtcgtgaagaacatccgcatgtgtggggactgtcactctttcttggagcacgcctctgctgccaccggtaaagtgatctcggtcagggactcgtctgggttccacattttcaggggagggaaatgttcctgtagtcaatagagactgctagagtgggtgccagttttgacatgtttgcagtttaggaactataggagctagtgagttacccttgtacttacatcactgtgatatcttcaggggtagggagctaagactaat

SEQ ID NO: 9216 - DNA, 776 bp, Zea mays
tgcacagctatcccttcccagtacctttggaacagcttctagagcctcccgagctctacgggaaacagtatctgctttgcctgttgagggtcgaatgctttgtgcctctgatgttttaccacttcctgacgctgcttacatgttgcagtctttgtatgctgatgtggaatgcttcacaggtttcagaaaaccttttgagaaggcatgtataaaactttgggcaaaaggagatcttcctacccagcatatcttgcctcggaggagggttgttgtattcaatactatgggtttgatggaggtaatttttaacaggcctgttgatattctaaggaaattgtttgatgggaacaccttgagatcacaaatcgaagaattctttaatcgctttggtgctggagaggctgctgcaatgtgcttaatgatagctgcgaagctactttatgctgaagatagtctgataagcaattctgtttctgagaaagccgctgaggcatttgaggaccctgggcttgttgggatgcctcaaattgctggtaccactgctttatctaatacacgaactcaggctggaggctttagtatgggccaagttgttcaagaagcagaacctttgttttctggtgcatatgaagggctttgtttgtgctcgtcaagactactttatcccatatgggagtttcctattatggtgattcgaagaccggctggtactaataaatgcgaggatggtgtaattgtttgcaggctttcagaggcaccgagctcgaatctcgtaa

SEQ ID NO: 9217 - DNA, 693 bp, Zea mays
tgtggatgaagctgctgccatcttcaagctctgctgagttggaaagggcagtgatggtgatgcagaatttcaggtgctgcagtctgttgcaagaccatcagcaccttattattgtctgcaggcaatgaatgcgcaggccacaccgtatttcagcatctgccaaaattgctctacctaatcaatgcgagtggcgtcctcatgaacaactaatccttcctccagatcgaacacgggttgtcatgagtgctgcatcctaaaacggcttcagttattcagacaaatctgccggtggtcaactgagtgaggttcacaaatcacaatttccgagtaacagaacagaactgtctcgactcgaaacggcgtcttaatcgagagtatagcactgaaaccgacatgtaatgtaaacgaaactgtctgttacaccatgactgatttataagaaggaacataaataaaaaaaacagaggatttggctgatctattgatccatacctctctaaagaagtttcgaccctgaatcatcctgcaacctggcagcgttggagtaccgcagtcgcagcacgaccctggagactggatacgggcacccgaagaaccgaacgatgttctgcaaacccctctctccatgctgcaaggcatttggtgctgagctcagacggctgaagtacgtgttcccttcgtagatatagctca

SEQ ID NO: 9218 - DNA, 687 bp, Zea mays
tgccactacccacccccaccccccaaggccagagatggttcagctcccaaaaccttaccggagcttgcgacgacatactcgtttggtttggcttatttgtctcctccctttttttggtttcagaaattctgacagtgagtttatttccattttgggttcttgatttaacttgaaatcaagaggcctctcataccatgatcttatatatacaactacaatggacagtttacataaaaaacagccgcaggaaattagcaattaggcgatcaaatgcgacacaaacaggaaccattgatctcataaataaacaaaaacctaatagaatttgtcatctaatcgtatcagatttgttagcaataaggttacctagaacaatatctaccgtataaacaactcctgcagcaacatgaccgcccagaacacgcacgtaattcagatcagatccgaacagaatagatcagccaggaaaccggagcagcgccaacgtacccccaaaactcctcgacggtgtcgaaggtgtacgcctttttgagggaggtgccccacgcagcgccgggtttgggcttggactggatgtcgtaccagaaggtccactggcggtgcagcttatgcggacccttcgcctccgtagcggctccgccctcggtcaccgtcgccacctcaggggtcgccgccgcaaccgcagca

SEQ ID NO: 9219 - DNA, 689 bp, Zea mays
cagaattcgagctcggtacctctgctggttcacgagagagagagagagagtcctgtgatggatcttcttctcactataaatagggcaaggcacttgaggccattccagcagtgtagctagctcactccatcgtctgagccaaccttctggccatgacacacacacatggttaattagatctcgaacccttgtattcattcccatccgttcctgcttttggtcttgttcatccacagaccacagagagcccagccactacgtagatagatagatagatacatacatactcaacgaactggcggcgaggatctgaggagaattaggaaaaaagaagggtatggaacaacccttgaagctcaggagggatagcgcctaggaaaacacatagatcggagccggccgcgaggagaaagaaagagccaagagatatgtgtgatgaataatctacatggatcttggctagcttttgtgttctcctctggaggcgaggttctgtctatcaatctgaagcgctatctatcctgagctccacggcttgttcttaccacacgccggcggctggccggccggccggccgatcgatcgatcgatggagctccatcctcgctcccatatatgaataatgacctcttgccgtcgtctgcctcctgttcctgtacttgttgttcttgtgatatatgcagcatgca

SEQ ID NO: 9220 - DNA, 653 bp, Zea mays
tgctgcttgctagataatgatgtcttcaggcatgatctaggcagtgctctgctcttctgaactgagaaagtacgaggcgaacagagcttgtcttctagtgaggccttgtttgctagagcaacatgaggtgtcgtagtgccagtccatgattcctttaccttcacactttgctctagatcaggatgattattatcagaaatggttagctttgaaacaggccttagaagattgttcaattggtcagtgctagaaactgtcgtcatctgggtttttgatgtttggcaccttgatgagcatgcttttgtttttggcagtggtgtcaagagaaacaactgctttccgctctcgaccatacaagatccagtgttccatgagacaagtggtgaaggtgagacaatcatgtcgacctcagtaaagttgctgcaaggtgactccagtggatctgtatcaggtagcttgctgctgccgctgatcaacttgccactcccttttacagcagtatgtaggcatgttcctggtgtgttttgtgaactatatgtatcaggtagcttgctgctgcctctgatcaacttgtcattcccttttgcagcattatttaagcatgttcctggtgtgttttttgagctacctgtatcaggtagcttggtactgca

SEQ ID NO: 9221 - DNA, 731 bp, Zea mays
tccttttgctatccattgtcacaggggggggggggggggggctgggcaagagcagaaccagctttccttccttgcatctgatattggtttctacggatgcaacagagggggcagtggcgatccatattgaactgggtgtactgatggccatggatggtgctgctgtggaggaggagacgatgcatatcggacagggtttgtgggtggcaatgggccagggtaacatggtggtggcgatggccatggatgcgttggggtgcagggcagcggtggcggcatgatggggcatggcgggtgatagactggcgcgggaggaggcagggatggtggaggtggggaatgcggtagtggtggtgacgacagaagttgaggtggcggtggtgaaggcagcggcggaggtggagatggcggcggcggcgatggtggaggtggcgaaggcggggcggtgaaggaagccgccgcggcggcgacatgggcgggacgaacgatttgcactggaatgcggcgcagttgacaagtgggcgggcgtagaaggcggcgcactgctgcggcgtccgctgcgacgagcggttgggcaggcaattgctccggtcgccgtcccgcgccacgatgcgcgcacaagacggcggctcgcacgtgaagaagttataggccaacgtgaagttcttgaggcgcggcaggtcgcatatccccgacggtaccgcgccggtgagcaagttgtgcgcggcgtc

SEQ ID NO: 9222 - DNA, 736 bp, Zea mays
acccctgctggagctccatccccgaactcgcaggtgatgaacatatatatgcatgcattcttgacgctgttgcaaatttgcaatgccgtcaccactgagacctgtttgctgacatagtagtagtggatgggatcggacggagtgagtgaactggtggtagttctgtttgcaggcttgcagaggtgcggcaagagctgcaggctgcggtggatgaactacctccgcccggacctcaagcggggccgcttctcccagcaggaagaagacctcatcatagctctccacaaagcacttggaaataggtaactgacctccgctctgctgaacagcagatgtgcctcccgtcattgcctcagcttaattacgcatggccatctcatagtaacccgaccgacccggccgtcgtcgtcgattgtgaactaatttgatggtcattatctgtattagctggtcccaaatcgcggcgaggctgccggggaggtcggacaacgagatcaagaacttctggaacgcgcggctgcgcaagaagatccggcagaaggaggcctcgtcgtcggcgtcttccacagccgggagcaaagaacccgccgcgagacgcaaccgaccgaacagcaccgaaaacggcgacgaccggataaagccggcgccgccgccggtgttcaccccctaccccttcgtcccgccgtctcctcgggaccatgtcgccgcggccgcttccggcgctagcagggggatc

SEQ ID NO: 9223 - DNA, 718 bp, Zea mays
tggtgttgatattgatgtgttcctagaacctcttatggaagatatgacaaagctctggaatgaaggagttagaatatgggatgagtattgccgtgagtatttcaacttaagagcaattatatttgttaccatccatgattctcccggtggcgccacactatcagggcaaaagactaaaggaaagaatggttgtgtagtgtgcgtcgatggaactgcttcattgtaccttaaatcatccaagaagttggtgttcatgggacacagacggttcttgatgaagcagcataagtaccgaaagatgaaagaggaatttaacaatgaactggaaagtgaaggtgcaccaaagccttatagtgggaaacttgtttttgaaattgtaaagaacattcatgttgtattcggaaagggaaaaaacaaaggataaaagacaaagagaactgacccttcaacttacacaactttcaagaagcaatcaatttttttcaagtacctcccatactagaaggatatggaaatttgccacagcattgatttgatgcatgtaacaaagaatgtttttgatagcatcattggaaccttgatgggcatgccgagtaagacaaaggacggacttacatcacgcaatgacctagtagatcttcaaatcagaccggaacttcatctagtggatagtggcaaagggaagccttacctccccccagctagctacaacttgtca

SEQ ID NO: 9224 - DNA, 693 bp, Zea mays
tcggtacccctgaatcccccttctagcttactatatcaaacaaacaattgtataaataactcgctaaatgaatgccgaactttgtgatgactttagtttcttctgtacttctctattcagatcaccgttcccagattttcagcctcttggtagcgaataggtcgttcttggtaccgcaacagctttgcaaactgaaaatgacccaaaaaactggatgcattagccttactatttagttaaaaacccagcacgctacttgccatgaattcgtcaaaatggtacctgagatgctttgagatcaagctcatcccattcaaaagatgggtttgtaccttcaacgatccccgcaccggcgtacaccagagtgctgtgaccctggaaccaaagtgcgttttgtaactgtaaaatctaacaatttcgaatctgttcaagtttaaaaaagatttggagttcggtttacttttccaagtaacgctgatctaatcccgacagcgaactcgcactcagctcctccaaaccagccaacaggaccagcatacattccacggtcaaaaatttctgtcagaatatccaaaaacctagttagtatgtgtctaatttcagaaaggctatgttcgaacagaataatcaaatttgggcataccacaatcccgtatgaattggcgtgcctcttcagtgggcaagccacaaaca

SEQ ID NO: 9225 - DNA, 744 bp, Zea mays
agcgtacacttgcctgcaaagaagtaataatagcatcaggtacaagatgacaaaaggatattttctagagaacatcaccagcaacttcaacatgtgcgtcatagagcattaaagtattaagggacagacaaccaaatcaaaagataacaaaaacattaatagattacaatctatagtatacagttaacagatacttcataaacaacaatgcctagagaaccagtatattaggtacaagatgacaaaaggataagcccatttcctacatgggtcaaatatctagacttacgtagttaagtaggcctaaaataaaatttgcagcaagaaaagaaacaatggctgtaagtacaaagcttaaatattgaaaacacagaagttaataacacactagtacattacaatttaaagtagaatgaaccaataacacaacacctagataaaaccaatacattaactacaagacaaaaaaaataagcctatttcatacatgggatatattgactatagtagacaatgcagcatgaatagaagtattagcagtcaggtacagtacagagctcaaatattggagcaaattaagtctacacataaaaaggcttgaaaacgttaagcaatgcatgtatatatatatgctacagagcagtgttctgaacataccatggtccacatgagcaatgacagacatgttacgaatgttgttctttttgtccatgatggcacggagctcttcagggggatctctag

SEQ ID NO: 9226 - DNA, 712 bp, Zea mays
cgttgttgggcagtaccaccacgaggccaacgccgggagcagcagcgctgcggccggcggtaacgacggttgtggcattgccgtcggcggcgacgacggcgcagcggcgttcatcgacgccatcctggactgcgacaaggagacgggggtggaccagctcatcgccgagctgctggccgacccggcctactacgcgggctcctcctcctcctcctcctcctcgtccgggatgggctgggccggcatgggcctgctgaacgctgattaattaactcaagactgctttagtgtttgctatacgtacttaccatcaattagtatgatggtcaaaccttccaaccggatccattcatatgcttgcacaactctgggagtctgggtgttttcggattacaaattgtacggataattgacgccatttgtgcgtgtgtgtcttcattcattttcctagaggaaactgtgtttgtgttgtgtggttcaagctgccgctggtataacttggcacgtctcacggcacctgaaaaaaaatcacgggcaggcttgcgtcgttgcatcggtcgccaccacacaccggccggcccctatcacccgtttcctcacgacggaacgggacgatgccgcagcagtcagcgtaacaaaaagaaagcaaagggtgaaaggggaagggggagaataatctcggtttttagcacgcaaacacacggcacgagca

SEQ ID NO: 9227 - DNA, 708 bp, Zea mays
attcgagctcggtacccctgttgttttaaattaggagaataatgttggcgcttctccgcttgtgcatgcgtcacttgtagcagctagtcttcatctgttaacaagttacttctcttcccagtggcatgaacttgtccatattctgcttgcacatccaaaggtaacatgcaggtttatcataggaccactcatcactcttcaatttcttgtgatatactaatttcgtctgaaacataaattatgaattttgccatccatcttatttctgaagcaaagctgattgtcgagcccatatcgctttgcttttattttggttcctgatctgccaagttttgtttactacatctttgctaacagcttctctacactaatctcattgtatgattcttggctccatgaaatataatcatgtagcacaattttgattgtcaaccttactcgtgatgttttattccagagtcattttagctatccttgtgtggcattttgtgcctgaatcacatagcaatcaatgttatcaagtcatcttactaatcacgattagtcggactgatcaatgtcacggtgatcagttatgtactacaataaatcacaattagtcaggctgatcggtgccatagcgactagggttaattagacgatttgataacattgatagcaatcactgcaagcttccatgtcaatccaaacttgctgtaaaatcctgca

SEQ ID NO: 9228 - DNA, 738 bp, Zea mays
tgctaccggccgtgaagcccgaggtcaaggtgttgcaccaatgatgcatgcgtctagcgtcgctggccatggcggccgcgctgctgatctagaccccgtcaaggccaagatcgtctcccaccctagctaccaccgcctgctcgccgccttcttggactgccacaaggcacgcgcgccgatcgacgacccttcaactttagcgcgcgcgcgcgcgcacgtgttcgttcctgttgctgctatccttcctagattacatgtgttcatatatccctgtcgcatgtgctcaccttactcaggtcggctgcccgccggaagcggccgaggagatcgcggcggtggcgcgggagcgcgaggcgtggcagcgtgcagccgcgggcgacgtcgcgcacacaaggccggacccggagctcgaccagttcatggtggagtaccgtacgaaacacatgcatgcttgcacatgacacaccctgcagcctctcatccctgggatgatcacgcatatatatggcctcatatctattggtgttattcggttaaacacatgtttggcctttgtcatgtgtgaaagtttttgttgtgaccaggagtcctactgcgagctgcttgtgacgtggaaggaggagctgacccggccgctccgggaggcggaggagttcctgacgacagtggaggcgcagctcaactccattaccaacaccgggccaaccatgggagctttcatctcttcaggggtacgag

SEQ ID NO: 9229 - DNA, 684 bp, Zea mays
tgcgacagcagcagcagcagcatcggcactgccaacaccaattgccaatgccttcgcgtccagccatcctttgagcaccatggcagtcgagtcgccactagagtctggtatgtgttgcgggggaggagcacgttcgttggtcacttcggtaaaccaaaccatatctcaaatgttactgatcaatgtgattccttggccgttgacaggagagcagctcaagctgagcagtgggtttgctctggatgggaagctcaacggtggcgacaaggaagaatctgcttgcgaggcgagccctgacgccgctgatagcgaccaaaggtggattaaacaacccatcatcatcattcttcttccttgttagttatgatacccacgcttgcctttcatgaatcatgatcctatagatatttgatattaatcagttctggaaagttgaacaacatttgagcatgtcaaaacctgatcgttgcctgttccatgacaacagtggagagcacaacttgccggacagcccatttgcgtcccctaccaagtctgccgcgctcgtgcacgacagtttcgccgccacggagcctgagaacaccgcgtcctgtgttgggagcaagatcgacggcggcagtaaccatctccgcccccctgcgctggaaatcccttcgcccagctcctacttcttccccatgcgca

SEQ ID NO: 9230 - DNA, 744 bp, Zea mays
tggtgaacatatagaactacactatatctgtactgtttgttttatgttttttcactaaaaaatgtttttgctaactttctacataagcatgtgattattaaactgcttgcctcgttgagaaattacaatgagtaaatacagatatactagttactcatggttcctttatatgatagcagcagtagggcactagtaacactgggaccacttgtgtgtatgcaagagcgaaaagcaacgaagagtagagatctctgaaacaagtacatcactcacagaggaaaaaatggtagaacctaccgatgttaataccaagcatagaaggtagcgcgtgccactgggccccatcttcttgagtaggatagaagcgaggaaatgcagagatttgaggccactcctcctctggtccgctgcagccaatccaccgccggcaccgttctggctgaaaccatccccattggcggccaatgcaccggctccgccgctgcgactcgcctccgggcgcctcctccgccggcggctctggctcgagcgggcgtacgccagagctccaccggcaagcaccgcgccggagacaacggcgagcgtcctcctggttggtggcgcacaagtgaggaaacaggcgcggcaggaggacaggagacagaattaaagtagggaagttggcgagtgatccgagccatccgaccgaccgaccgacctcctggaagcgagaagcccccggccgcggtccgtcaggggtaccga

SEQ ID NO: 9231 - DNA, 673 bp, Zea mays
tgctgatgtggatgtacacaaacttaggaatgcattggaaatactctctgaaactgaaaagcaattgaagaccacaaaaaaccagtctacatggctcactgctgcactgttacagtttaatatgagagaaccctactgtctagatgatactgcggtttcaagcatgtttactgaaagtcatacaggtaattaatattctctgcacccttaatttaatccctcctgaatgttgaaatatttgagagcaagaagcactgtgaagtggaactaatgtcaatgtcacttcatcagtatgtctgtttactgataaggaggtgtactttgtgcagatgatgggactgcagcactgaaagatgaaagcttagacacgagttcccatctttgttcccagaacaaaatcagttctctagacatgaatctgggagatccagatgtactggagacgatatggatgaaagctcttgaaaactgctcgtcccctccacttcaaaatctactactcaaggatggaaagctgtcatctctgtacacaacccaaggtaatttgctgtgtgtgtgtgggacatctttcttctgttttactgggagacagatccgtttgtcactgaacagtcgtgtccttgcttcctgtagttgttgtttgctgtggtccaccttaacacctttccagaca

SEQ ID NO: 9232 - DNA, 694 bp, Zea mays
tgcaatcatcagtaaactccatttcagctcaagaaaactgctatagaagcctagaactagaagaggtacttgaggcagcgtgcctgcctgcatacgcaaccagacagccggcgagccatctccatccgagttgggcgccatgcaatttgcaatgtcaccggacaacctcctcttcttctgctccgtaacggcgtcggtggccgcctccttcgctctcgtctcgctgtgcaggcacctggcgcaccgccgaccgcagcagcccaccgctgacgtcctcgcgacaagcacctcaggagtctccgccgagccagacgagctgctgccgctgagcgccgttgccgcggccgtccccacgttcatgtacaacaggctggtgaggcactgcggcaagggcgcgggctggaccgagtgcgcggtctgcctcggcaccatccaggtcggcgccatggtcaagcttctgcccgcgtgcagccatgtttaccaccgcgactgcatcgacctgtggctctcgtcgcgctccacgtgcccgctctgccgctgcagggtcggtcctccctccgagatcggcgccggccaggagacgccccggcagcttgctcaaccttcccctcaaataagatgaatccctcactcgcccgtcacagatgtttgtactggccacttcagtttctccacactcagcaggggtaccgag

SEQ ID NO: 9233 - DNA, 698 bp, Zea mays
cccctgcttgctcttcagaaataccattgttatcgacaatgaccttgaccaagctgcttagttgactgaagtttccacgaaaagcatcagcaagttcttgacccatataaggtgatatgttattcaagagcttgatggaattcatgcgtacttccctttgaggtgcttcaacaaactgaattaaactgacaatagcacctgaacttttgatagcatcaactatattttgtacagatgtcgaagagtcagttagaccaacgaaaacctggagcaacttacactcaattgcaggtccagtgttgcttataagatgaagtagattgtgtacaatgtcttcagacaccaaggtctgcctattatgatcaagtggaatggactcaaaacgtgcacccgatgccacaacatttgcaagaatggtcgctgagacctccttcaatctcataggaagctgattactgccaacagtaaagaggtctgtgatgagaggcggaagaatacctgcttcaattaatatctttgcactagcatcataagatgaaatttggttcaatgccttcaaagctgcttctctggcctctctattcccttttttcatgatattgactagtgtggaaccagccttttgtgccacaagtaccttaacatcattgcttaaaacaagctctccgaggtatgcagccatagataattgtatgtca

SEQ ID NO: 9234 - DNA, 686 bp, Zea mays
tgatgtgccgacttctatggcttccttggttgtactatggttcctcgcaatcgcttcgtccttcatactgtcctcgaatgttgcctgagaaaaatatatagagtattaagagacagctaagaacatatattatactctaataccatctgtcattagcaacagtacaagagtattgtgcgtctaacgatatgatatgatacgatatctgcaggattcattattggagtacaatggtgcttgtggtatgtgtgtgtgtgtgtgtgttgcagcgtttggaagccaactgccatttgaagttgacataacaacgatgccacttattatcagcaagaaatatgatatggatatatcaaggactaagctccgagtccttcggcttacctcatgtattagcactgtagcatctctggaagcgtctataagacctggacagggtcgtgtgtcgccagaatatacaaccttccagcctggaattacctttccagtgctgttcgctttttccatggccttcaaaacaactccaaatgcttgtggacagtgtagtacagggacgctgtacaaaatctctaaacctgattcctgtaggacttctttgaaattagcaagagctgtggtatcccttggacttgcaggcttcctgttgtagttctccattctagttccaggggcaaacatggtggtctcca

SEQ ID NO: 9235 - DNA, 671 bp, Zea mays
cagtcgaccctagaggatccccctgcgttgcgtgatggctggtccgtcgaaccttcgctgttcatggttttccgtgatatacgattgagtagttcgattcaatagacactagaatcgatttgggtgccgccgacctgattgttccgtctcgaatgctgttgggttggatggggactacggggatggtgttttggtgcgcggtgctgccggggcccaatgctttgcgtccaagtcccagattgcaggaagaggaaactttgttgtcaatctcagatttcttttctctgtggacgtgtgtgtctgtccaacaacgccttctctggaattacctgatcttgctgcctgccattgataggtatcgacgatcagacggagcagttgcttcaatctcgacttcgacctccatctgcattgaacccatttgggattttggagagtggggtgcttgcttggattgcacatcatctgcatcagttcacattttttgggcatttgctatcttgtcaagcttgctgactatacagttctggttcaaggaacgcctttctgaggtctcttggattatgggagctttctgttcatgtctgcaacctgattattcggaccatcatggaaaccaagcttcttcggcgtttaggaactgcatgtgcccttaaatgctttacccagca

SEQ ID NO: 9236 - DNA, 683 bp, Zea mays
tgccagtggtacagataccggcgatgcacgagctccattgggtggagaacatgtatggtcggtgaataaagttttgatatctggatttggacgagggttcttacaaagctgatgctgccaattcaagctgcacatttggggggggggggggggggggaaatcatagtcacactaaaaatattggaatggaaacagaatatccgttaaagtaacagcattagattactttcaaacctttgattgattagagttcggaggcgtgatgccttaagagtagggaagacaagtttttcccggaaaagggggtttgcttcaataagtttttttagctcaaccagcataatacttcgagctgatttagtatccccatacttagacaactgttcattttccctgcaagcaacattatttgatagttttgagctacaaattgaaaacagaagcagcaggctaaggaattataatacttggaataaaacactgtaggatagtaataaatatattgttaagcaactaacaaatttcattttaaaaaataatttttacaggaaaatacagcataacataaaagctaccaaatgaatatcttaaacaaacctctatcatttgcaataagcatctggcagctaacgagttatgccgttgccggcttgcaggcctactcagctaatgtatgtgtacca

SEQ ID NO: 9237 - DNA, 669 bp, Zea mays
ccttctgaagtcggagtactctagtgaagaaatgcaatccatcggtatgttgccgatacctgacctgcagtctcagcttgacagccttttgtagtttgcatacaccatacagcggcgctgctgtagtccatgttgacgttgcagtgcagttctttcaagtaacgcaagtaaagttgttaccacaatttcgaacctctctaccatatcgttgttgtaacttttcattgtttatattgaaaaatggaaatggaacgcctcccatgattcatgtgattgtggacaatctggaagtttgaactcatatcctgtggtgacttatgtatattgtacacgcacgttgtttcctcctctgaaattgactggaatagtttcaacagatcatgggttgttcatcctcttgtgagatctgcctatctgtggcatggcttcccaatcctcactgttatgttttagaagaattatgccttctcaccgaaatccattggaagtttcctactcttctagacatctaggcaggccgggtcaaatggctcggttccatttgctagagattccgggccccactggttgcaccagattcatgtgtaaaataatgtgatgcctctcgacgcctggggtttctggccggcgaggtggcgacacgcaggggtaccgagctaaaattagtat

SEQ ID NO: 9238 - DNA, 751 bp, Zea mays
tgccaacctttcgtttgtgattctgactcccatatacctgccaagttagagacacaatcatccattggaagattggtaggattcgacctaaaagggcaactttggagacaggaatcagtaccactagggcctgtcctggagaagtgctcaaagtgcgctgataaaacatcacaggtgtaagcagggagggattacctgccgagcatcatgacggttgcctgcgggttggttcctggcgaggcgttgaaagtggagccgtcaatgacgcgcagcgcgtcgatgccgagcactcggtattcagcgtcgacgaccctgccgacctggcagccaccgtggtagtgccagatggtcatgacggtgtccttgcagaacatctcaagcgacgtggagtcgttgtcgtgccggggcagcaggttgacggggaaccccgtcgacatgttgagcagcgtctccatggagaagtcggggtacgtgaagttcttgaaggcctgggagtggatgacgcgctcgatgaccgacaagccggccacgcagcggcggaggtcctcggggtgcgagaagtagttgaacgtcaccagcgggttgtcgtcggggtcgcggttgcgcagctcgaggtggcccgtggacagcgggccgaggaccttctccaggatgaagccaccgcggaaggcggagtcgtcaagctgcctcatcgactccgctgcgcgcgcgatggcctccggcgtgcgctgcttcgggggcgccgtggcca

SEQ ID NO: 9239 - DNA, 721 bp, Zea mays
tgcgcgctagctagagcttagactaaaattgggttacagtcagctcactacacgcgcgcgtcttaagggcttattcgattctaccccaatccatatggattgagaggaattgaggttgtttcaatttctagtaagttaaaatctctctcaatccgtatcaatcccctccaatctatatggattggaaataaccgaacaagctctaagtgcccgttcggttgataaggaatagaagaccggaactgttctggtccgaattgcttctctaatttgtataagttttgatcaacaagaataattcttggtgcaatcctgcagaaacgaacaggccctaagtccgcgctaggttttggacgatcatgaaaagtttgtcacgcttttgggggcgtcgctcagctcggcattcggctgatactaatgatagagccacacggcccggccggccgcggcagtcggaatgagatccggaaagcggcagctagcagcacctcacctctcattccttttgctttgccaagccccggctgttccggatggcgtcgctcaccctgggacagcttcggccttgcatgatttgtttctcctccgatcctgatcgattggccgcgccgagaatcgttttaggtacggtgtgcgtcttttcgcggcaaaagtgattgacgtgcatgcatgcatgatggacggatcgatccttttttttatcatgcacagcagcacagca

SEQ ID NO: 9240 - DNA, 724 bp, Zea mays
tggtttgctgcctagttaacgtcttcacaacacaataaggaccaaatctggcatcctttgtgtattggcatcaatgcaggaaatagtccttcaccctgtactctgatgatgcttctactagattcattttcaaattgatttcttaatattttagcactccctgtgctacacagtgatggtgattttggacagtgttaacataattacctgtggaccatgtttgcaatgttgttcatacagaccgtggtttcttttcttttgcatgttgttctaagttagcttctgagtggctgagtgttatttcagaatttgcattgtttcaagaacttgcatgttggtctaagttaacacttcctggtgactgtttggctaccattaaccaaagtgtgtggtttcttcattctctatctatagaagtactggactcataaatatattagcataaggaagtcatcacaataacctgccatctttttgtatgccagggaaaagtactcttgcatgtgcactgagtcgtgagttgcattgcagaggccacctcacgtatgtacttgatggtgacaacctcagacatggcctaaatagagatttaagctttaaggcagaagaccgtgcagaaaatatacgaagagttggtaagttctgataaaagaagacgattcactagaaattctttcactatagccaaatcttttgtgcagagggatcatctagagtcgttccg

SEQ ID NO: 9241 - DNA, 694 bp, Zea mays
tgacgcactcgctggagtctcaacccaagggcaagctcgggccaagctatgccgaccccttctaggtgttggagcgcgttgggcatgttgcctatcaccttgcctttagcttctagagggcgctcgtctccatgacgtcttccacatagggcttctcaagccgttccaaggggaccctcacaactactgcccgcgccacagcgtgtgttgcgcgctcaactatgccgaggcacatggcatgttcttgtttaatggcgtggcctgcccagcggcgacaccacttggagccgtttcagtaattcaaggacttctaccctcacattcagctcgagggcaagatgttcgaagaggccggaagagatgttatgaccaatattacctgtagaccgggtccgtgccagtgggcagtggctaggccacgccggcagttagggtgaaatgtccaggattttccttagatattttgcgttgtttccataaatataagatcgtggttaatttctgttaggagaggataaatacctctaaacagttttagaataaagcaaggcaattatcttgcttggcctcaagggccaattttcatgtctctcccccccccctctcgctcgcccatgctcggtgcacgatcctggctcctgtgtgccgccaagggccaagggtgcatcgatctcctacctgtacaccctatgca

SEQ ID NO: 9242 - DNA, 725 bp, Zea mays
tggcttgatggaatcatagagcccaaagtacagaccacgataaacaatgattccaacacaggagatgttaaatccacggtaaagcccagcaataccatcagacttgagtgtcttgcggtagacatcgacaagcccattgaactgcctttcacctcctcccttggcagccttcgcgtcattagccaaccttgttctcgcgtagtccaaggagtacacaaaaaacaaagaggaagcaccagcagcaccaccagaggccaggttgccagcaaaccacttccaataaccatccctatccttcttgaagttaaacaacctcttgaagtagtccttaaatgcaaagttcaaagcctgggacaaagatttgaagacaaattaataatgtacaagttaaagtgtagtcggtaacttgtataccttgcaaagccaccaggaacattcaaccacttaggtaagaaagatcatggtgtttcaacatatttacagatgttactgagtaaaaaatatgatggaaggtgtgggctacctgagtagggaagtaacgaataacattagcagtgttacccctccacaaggaagagaaaccctcatccttaatggtacgtttgaagcagtcaacaatacccttgtacggctctgatagcctaccagacttaatcatctcatcttggttctgaataagcagcttcacacgctcgatgggagcagcagcagtcttcgaaacagca

SEQ ID NO: 9243 - DNA, 645 bp, Zea mays
tgatgtatgtgagggtctgtaaaagagattctatacataggctctgtttggcacagctgctgcttgttgaaaagcagcttatctgataagctggtgaaaagcagcttctgcttgttggctgcttttagtgtattctgataagcggctgcagaagctagctgtttggtagaacttctgcttaaatttgtgaaaaaactgaaaataagttgtgccaaacaggaccataacgtatgtaaactatatcctgtaccctcgaccccagacacgagaggcttcgagatagaacccgagcaaagcaaattcacctgggtgccccgccgcattcggcctcgtccacatccacatcaggcctaaaatcctccaaattgattgggcatttgggctcccttggttgggccgctggatgcagtctgctgcagccatcgtagtccgcacgcaagttagaagttaccgtgcggtccaagccgcatcacaaccgggagagcccggaggccatacgagacacgagtagccctagatttggccgctcgaatcgacttgctcccactgcacgcgggcccgtgtgcgggcgggtacctgcccgccagcccgcaacgacgcggtatatctagccacggccttatcgggtcacaccagggtaccgag

SEQ ID NO: 9244 - DNA, 680 bp, Zea mays
gggcggcggagcaggagacgagctgtgggaaggtctacaggacctcatgaagcaggacgaggtggaccgctggctcgcgccggttttcggcgccgcgtctagtttttgagctgttgtactgtgcacacacaagcgtggttactgacaggatcacagctagactgaccaccattcttttgctgtctattgaactagttggttcttttgtagcgtatttttttagggaaacatgattcttttttttttttgccgtgtgttgattgggatatagagagtttttttcctctcttgatggaagtacttgggaagctatgttgatagactgaacatttttttgtactctggctgctgagattctttgacgaattatacggtgaacaaagcatcgttttttatataaataaaaaaacagttgaccgatggaaccatacataactcgtcactcactagtcagaggccaaacgtcccaggtcaaaacaaacatggtaaaagtaaagtaggaaagcgctggagtcaatgttaattcattaaatttcttccctttcatttggcatcccttgtttatctcatccttgctctgagcatatgttgtttaagcattcctgattctgtcgcgttgcgctctgaaattcttgtggaaggatttagctaccagggggatcctctagagtcggccgcag

SEQ ID NO: 9245 - DNA, 737 bp, Zea mays
tacgaattctagctggttcccctggcgacgccgcagccggtgtcgagcgcggtgcggacggtgccgtcgcgcatgcccgggaccaggccctgcatcaggtccacgtacgcgcccacgccgttggggaacatggtgccgccgccggggaaccggaagcggtcgccctccttgacgagccagtgctggttggacttctggctgttgatccagtcgtaggggacgttccggtaccagcactggtccttgctcttgggccaccggatgggcggcttgtaccccttgggcggcggcaccaggcactgctgccggtcgggcggcggcgggcagtgccgctccatgaagctcaggcggtagttgccgtacctccgccagcgcttggggtcggtgcagggggtgtagtcctggtaatcggcggggcactcggggaacgccacggcggccgtggacgccagtgccggccgagcctggccgtcgtcggagggacggcgggtcgtcgtggcggcgccgagggcgaggagagccgtcggcgccggctggatggagtccagcaggctccgtcccgtgctgtagatgccgcccaggtagaaggagaaggcgcagagcacgacgacgacgagcgccaccggcaccgccctggaccctgcgccggcgccgcccgccctctcgggcttatcttccttgctgtacttcatggcgccgcccacgccacgctattctccccgtcgtcgagcgctgca

SEQ ID NO: 9246 - DNA, 686 bp, Zea mays
tggcggataaccttggccaggaggaggcggataaccttggccaggaggcggcggatagccaccataaggctgcccatatgctggttgcggtgcatatccagcaggaggcggcataggctgatcgatgcgtgacatttgttgcactgggggcactgccataggctgtgggctgaactttccatccctcttgtccatttcgactttgtgctgcgtctgcatttgcatttatttcaatgccacaagaaggatatgtgagggtttggttcacaagagccctgatcagtaaggttgcgagaagaaaagaatgagttatatacctgcatacatgcacaaaccctgcaaaagaatgtggcatagcattatcagaactgagacatttgctatggagatttgcaaaaagacagttaagggcggccttacgtccagtagaccaaatcagacagacaattaaggatctgggaagcctctgaaagctcctcgctaccaacaatagctgcaactatagagaagatgcaagcaacttgttgaaggcataacatgaagccctgcataaaaggttatattcagtccaagtgacatcggaagaaagaacaggaaccctccacaggacgttgaatcgcatcagacaggaaatttaagaggcaagtggtgttacaatgatgcagggtaccgagcagaggtagtga

SEQ ID NO: 9247 - DNA, 644 bp, Zea mays
tggtagactgggcacgtcctctcgtagctgtggacgtgtccatagaaggcgaggtcgaccttgtacttctgccagagctcctgcagcgcttcccgccccatgggctcctcgaacgtgccctccgactcgtagtaggcgcaggacgagtacccaaggacgcggtgcgcgaggaagacgagccacggctgcttctgcctgtcgacggatgacaggcaccgctcgatgaacctgtactgctcggtcccgggcctccagtcctcctccgtgtgagcgacgcagaacctgaacatgccgtagtccgttgcgtacctgaagaagaagaaggaaggaaggatcagtgttcactgctgtgctcagtcagtagcaaagttaagacatggcagtctggagaaagaaactgctatggccttacgtaactgagccactacatttaccagaactttgcgcggttctcagccggagtgtagaacacggtttgggcagggacgccgcattctccgccggagtcgaggttgccgtagaatgaaccggtgccaggccaatccctctcgtggttaccactgcagaagctcctcttcttgtaagcagtattgtatacatgggagggacatgagatgagagagtatcgaactgagaggcactca

SEQ ID NO: 9248 - DNA, 743 bp, Zea mays
aatagataaataattgtgttacaagtcatacacatgaaattcattagtgggtttcaatttcaactcgagttgtcccaaacaagggaaaaaataatagccaaatttttctctcatcattttttcaattatatctaaccacaagtctggcctttgtttggcagctcagtgatcttatagaagagcactacatttgttttgtgtatgtcaatggtacggtgaagtctttgtcagcggcttttcaccatccattccatttctctgtttttcgtgcatttacacatcagtaaggagctaaatcgggttgtaggaacactttatgagcttgatggaatgaaggatggacctataaatcacggaccctgttcttctataagtttgctgcaggtactgcaaggttctgaagtggttcctttttttcttcttgttttgcacatccttttccacttccttaaaccggttgctgaaactgctaacagtaaagctcaaagaaaacgactgatgcttattagaattttcagttataatatagcctacagtaaccattttattgcaccaggatgttgttcctgttattaaggccatcatgtgcaatatccccaactcaatcaacttcaatcttatggcgctgtcagggaaagaaaaataatgctggtgctattccttgagctggtaagcggtggaatgcaaaatgcaagggttcaagggaaggggattaaacggatgcctgtttggactgcaggggc

SEQ ID NO: 9249 - DNA, 703 bp, Zea mays
tgcttttaaatgtatttgttttccacgtacctatctctggtcatcgtggtttgaatgtacgtggttgttgtgggtcctgagtgtagccagaccatccgccagcagtcttcggaccgttcggagaagcttcagaccgtccgcgtctggatggcggaccgtccgtgatgcacaaaatgggttcccgcgcctgtctccctgtctgtgcttgccctcccagtgccaggggctgtgatggtcaccttcagggtctcccctccatcaggagtcttttctgccaccactttcctgcaagaaattttatgattcccattggcctctcttgcattgctgatgactatctctttgccctttgcctttatcggctgtgtttggccgaatcagaactttcttgccctcaaagtcgatcatgttcatcggaaagggctccttgtccacctgcatttcttgaaattttaatcgtccttcgttaatggccgattgaatctatcgacggaatacattacaatcattagtggcatgagaaaatgagttatgccacttgcagtatgcctgacattttagctcgtcggcggatggaacaatgtgatttattttaatgttgccatttttgagtaattcatcaaatattttatcacatttaccaacattaaacgtaaacataacctcctattgccgtttcttttgaaccggggggatcctctag

SEQ ID NO: 9250 - DNA, 713 bp, Zea mays
tgagacctgagagtcagagagtgagccgtgaggtgaggtgctgggccgaccggctgagtagtctgactgtacccgccgctaccatttaccacgctgtaccgtagcagagcaggcctcacgcggcgctgtcccgaccccgtcgaggcaaaaagccctggccgttccctcctcgccccgtgccgccgccgccaccaccgcctccgtgcgcgcccaggcttcctcctggtgagaaatcgtcatgtcctccgttgttcctcgcgcattcttcgctttaatcccgaccgacgggttctgttcacttcccctccgtcccgcattccttgccgcgcgtctcggcgtttgcttgccccccgccgccgctggcctggatctcgcgggcttctttcgcaatgccgcagcagcactggtttgttgttgggggtcgagttctgctataagttctgatccgcgttcttgcgaggagctaaaacgacaaggaaaggaacgcacccatcgctgcatgcgtctatgcggtagcaggaagtcaggaactgaaccattgctggttgggagatatgggcccaaagatcttgcgatcttcactgattgtgtttattcgaggttctgagaggggttcttcgctgtcctttgagtagttttttttttctttctttctttggtttgttgtgccatgtcatatttctacgagaggttggtggtgattggtacttgca

SEQ ID NO: 9251 - DNA, 699 bp, Zea mays
acacccctgcatgccacacgcgtcggttcatgagcttgcgctcgattcggcaacagagaataatagattttcgatttttaattaattaacgatggatgtcgccattgacagatctgggccgaacgagtcccccatcagcaggggcaggccgagcacggcgtcctccaaccaccgcccctccacgccgtcctccaaccaccgcccctccacgccctcctccaaccaccgcccgtccacgccctcctccagccaccgcccctccacgccgggcggcaccaggaggagcagcgtcggcacgccgtccacgccgcgctcccgcagcaacggcgcgggccccttcaagtccgagcccaactcgccgccatcggccgccgcacagaagccccgcctctcgttcgaccgctccccaagatccgtggacaccaagcccgtcgtcgagcgccgggtgcccaagatcggcaccactcctgaagtaagtgtactgcaccgaactgcgctgccctggttttcttcctctctcactgaaggaggaacaggtgctgcattgctaacgccctgtctgatcttgatgcacgccacgcctatgcctgatcactgtgatttttgtcgctgggatggcagaagcagctccggagggaggccgaactgcaggcacagcttgagtccacccatgaggacctgaagaaggccaaggatcaa

SEQ ID NO: 9252 - DNA, 746 bp, Zea mays
aacttgaccacaaggggcaacaattattatttggtcgtctgcgaagagaggcatgttagttataacatttatcaggagctgtcagtccatctatagctatgtggttactccatgcatgctacgtactggtggatgacaagggctggctgctagcggcggtagacgacctgtggaatgtgaatcacctccggccgcccgggtgacagccacgccacgcctaccgcagccagcggccaaattttcaccgcctggaccacgaacctacgtgcgcacgtacgatggaaatgaacgagagccatgtgatgtgatcctcctcttcttcaaatacccaccacacgcacggcacactataggtagctcactgtactgtaccctagctagctagtcgcctccagtccagagcgtcccgagactaatggcctgccacaccgtcatcccgcttcttctcttcctcccttccctcttggcagcggctgcggacgacgtcgcccctgctcctgctcctgcccctgcccctgccccggcggcaccacccgagcccaccaacaacaacctgaccagcatcctggaaaatggcgggcagtacaccactctgctccgcctcctgaacgccacccggataacggaacagatcagcagccaactcaagaactcgtacgacggcctgaccttcttcgcgcccaacgacaacgccttcgccaagctcaaggccgccggcacgctcaacgccctcgcagaccaagacc

SEQ ID NO: 9253 - DNA, 727 bp, Zea mays
tgcaagacagcagtagtcgtccctttcgctagaggcctggaaccatccaatccaacgacgatgctaatccaccgtcagaataggcagacgccccagcctcatccgtttggcccagcctctcccagtaaggccgcgttcgtttgttccaacttgaagacaggtatatgttttcaatctgagccggatagagtggatctgggtgtttcactaaaacctataaaggcttggtttggtttgattccaggtgattataggtgtggctctaatccaagtcgttgagtgggtaaaaaggtctggtttcattctggaatagcttggtttcattacagaacaggtctatctgaacaaccattttagattggttttaatttgagtccagatcaaataattcctgatggaatcggtcgtgttccatgtggttccgtcaaagccgaacgaggcctaaaggatacgatgacacccccggcatcaaagagaacaacaggtcagaaactacctaggaggtgtaatccaactctcatattgtgcgaccgacgtcattggcgtgcacacgaggatcccggcctgccacctacgactgccaaagccgacgcgtcacgggcaaacaacgtctcatggaactgaccgacgaccacagctcgtgctccagaggaatcaatcctatgacgtacggggaccaaagtctgccacggagaaacaagcttttgcatgggtgctatgtcaacca

SEQ ID NO: 9254 - DNA, 678 bp, Zea mays
tgcagcagcagcaatcccttcagtttgctgtaaagacaaatagtaaaagaaatcattgatgtggtgaacagagaattattaatttcataattttaattaacttatgagacaccatttgttatgtcatagtactgaactgtgagacatcaagaaaagtgtaggtcactgcattaagagtatataacaaccatgatctctagtaatattgttgacgatggaaatgccacagcaatatattactgtaaaggcccatgtggaacatattacttgtgcctatatattctacctagccctaagggctaattgtactctttctaatccaaggttagtgacatggtaagcaggttagggttagagcctaatctttttttcagccgccatcgcggccaaccccctcaggccgccgtcgcggccttctcttcctcctcaggccactgtcccggccttcccggccaccccttccgccgtcgcggcccctccccacctcatctaccggcatgccgtgtccgcaaggcagcttcgtcaggcctcggcccaatgcgcgcacgtccgctcaccgtcggcctaatccgcgccgccggcacccgtccgcagaccgctggcgcttgatccgcgcccatccgccggcgcccgtatcaaatgcgcacaatcacacactgaaaagagttaccaaatgca

SEQ ID NO: 9255 - DNA, 673 bp, Zea mays
cttcagctcagctgtttttaacctgtgttcaccaggaccatcctggttaaaagcggttgaaccgccctggtggaccggttgaaccgcctgttctgaccgcgcaggcctgctctgctgcagcagtgtctgacgcgcagtttttttttggtcgctttctgcagggcgcactacttttctgtgactggtcatttcgcgaaattttttttttgtttgtttgtgtgtcaggcgcgcagttttttcctgtgctgctgcatcacgaagactacttttttgcatgcagtcacgcagcgtcctgtcttttcccctgtgcggtcacttcttccctggcgcgcaggattcctttttcttttgcatgcagacttcttttgcatgtggcgcgcgcaggattcctttttattttgcatgcttctgtccggtcacgtcgcgcgcgcagtaatttttttttggaccttagcccctgtccggtcgtcctgtctctttttgcatgaggactggccttgcgcgcccgacgccatgtacttgcagactgcagcgtcctgtcttttcccccgcgcagttttttttttcttttgcatgcagtctgctgcgtcaggtcacttccccctgcgctgcgcgcaaattagaattttttcctctgttgtttctggttctctaaccacaccggtcagtacca

SEQ ID NO: 9256 - DNA, 680 bp, Zea mays
tatggactccaggagggaaggcaaccaacaagctattaaggctgaacacccaggattccaggagggaaggcaaccagcaagctattaaagctgaacgtatatcaaccatagcgctctcggtaaactcgatccatataattcttcctcttaaacaactagtagaacccaaagaggcatgtagaacttacactgggtcgacgtttgattggaaattataaacttacactgtgtttggtttgttcaatgaagtggtccatcatcaccccactctctaattttttgtctggtttgtgaaatggttttggaaatagaataagttgatccatcactacctcattctttataatataataattagtactagtatgaaaaatgtagtaaatagtaattcccctaaatttgaggaacggactcatcctcaaaccaaacaatcaagcatcccaaatgttagacatcaacctaagtatctcagcaacctgaaaattactaatacctgtaaagcaagataagtagccatacatagacagttccctatcaagcacagcactccaatgtgccagttttccagcccaaaggccatgaacaaagatattagaggtccggcaggctcagactgtgtcatgtcagctataacaccatgactataaacatcaagctcaagctcgctgctaccaaacaca

SEQ ID NO: 9257 - DNA, 696 bp, Zea mays
gtacccctggaaacaaatgaacaaggcctaagctcgtgtctttctctcacgtccttgctttcttagcctcatggtcaacaagaatggtgttgataacacgatatgtgcttattgtattgatctagatggctagctgctacgtactgcaatcagctactagtagttgagatgacctggattctggaataagcccttgctatcttcgcctgtactgctatctaatcctaggaagcatgtatatgtatactggtaaaagtaacgatggaagatgtgagtctgattgcccgccctgatttgtctcatgggaggtataagactatctccagcaacttacccatctctgtacttatattcaaactttattgagcgaacaatgcagtctatagtgcaggagtcggtcaaagattgttttcaagatattttacattgcatattgcatcgatcataaagtagagattaaaataggagatatgatgtgtaagctcctccctaagaatacgtgggttgcgagatgttccttatatgtggttgctccagtgttgatgatgagaaggcttatatttttttatgttgtatgtgctgagtacatgaagttactatgccacggccatgatctctctttatgataaaagtattttgcagcgatgctattgatccgtatctgagaacagggtggtgaacacccatttcattgca

SEQ ID NO: 9258 - DNA, 699 bp, Zea mays
tgcaaccatgcagagacagatgaaatgtttttatctggtgcaagtcacgccattctttattttcagaggagtgtacaaaaacatttgtggtggcaaacaaatggaagaaaaaaattacaaaaaagtccaggtcagctaggaacggaacggactagttaaaatgcaagttgaaaaaattgcaattggcaatgaagaaagtaaacaaaaaaacaaacaaacatttgtctaattcacaattccctttaatttgaagcgaccggcaggatagagatagaggaagagtctaatcaacatttgggtaagtctgacggcggcgggagcagcttctggtgcgggaggctgccgtcgagcaccaaccatgccatcctgaggccccatgttgtgtgcgcctccaaatggcaatgcatgaaccagacccctgtacattcagttcagttcagttcatagagcacgcgcacgcacatgtgtaagaaaaaggcacgcatgcagaggcagagctgctctttactctttagcgatgagagtcttattaccggggttgtcggcgaggaagcggatggccacccatccgccggccggcacgccgacggtgttgcgctcgacggggtcgacgaggttgaacttggacgggtcgttgacggggtcgtagttgccgtacccttggccgaccacgaagaagttgaagccgtgcaggggtac

SEQ ID NO: 9259 - DNA, 710 bp, Zea mays
tcggtacccctgcatgcagtgcagcgtgtggtgtgcccccgccggcattattccttccctcctcttgtcctagctagctccccccactctgatgagatcgatgatgcgccatggtccacctccctcttcatgactccatgtccatgaggcctgccgccacggccatttcatcttctataaatagcagctcttcccacacctcctccacttatcagctcagcatacacaacatcatcatcatcatcttctcgctagtcgagcgagcccttatagttaattaagctagtcgatcgatccaagagaagaagaagaagcagcagacaggaatggcgtcgctctcgatgacgacgagcgcagcggcccgcgcgcagtggacgcctaggcagaacaagctgttcgagcaggcgctggcggtgtacgacaaggacacgcccgaccgctggcacaacatcgcctgcgccgtcggcggcgggaagtccgcggacgacgtcaggcgctactacgagctgctggaggaggacgtcggccacatcgagtccggcaaggtgcccttccccgcctaccgctaccccgccggctacggggccgccgacaggtacgcatccaaccggccgcccggaccgccggagcaatggctaatcttttatctctttctttcattcaacactcactgatgcaaatttgcatatgtgtatgtgcaggctgaaaca

SEQ ID NO: 9260 - DNA, 826 bp, Zea mays
tgccagctagaagggttgcgaagcaagagcgtcatgaaggtggacatgcagaccacaatggcaatccgctcgctgactgggctcagaacgacatacgcacccaatgcgaatcctataaccatacttcttgttgcctgctccatcgaaattacggagaggaacatgtagattgcacgaagcagtgggtggacgtgttccgacccagcataggtgagccagatggtggacaaggtggagccgacaaatgcgagggtgtttgccatcacgaacgccttgaaggtgtacctgtgtgacagaattggtgcaccggcgtgtggatgcccctccgatatgtagccgccaggaagagtgaaaactgctgcaaacgtgaccgttgaaacaaggacggaaccaacaattaagttctgtgcaatgttggtgaatttcttgagctcgtttcctgaagttttgccaatgccaaaatcatcgatgaaatgatcaaggcgacgaggactaaggacagctccagtccatgccaaacagcggagtatgatgacctgaggattctaccagaagaaaatcaacatttcaggaaatcaaactatacaagttaaaaactgaactgaaatacaattcaaatcgaacgagaacatgaattaaaagatgcaaagaagaatgcagtcctaggtgattcggtgaagcttaccagtgtataacttatgcctttgtcagcgtgaattcgtccaagactactgttcccgcccgaggccgggctcaaaccaagcgagatcgcgtcccttggtagacgaggccttgacctgaaccgcgccctcagttgtttcggttt

SEQ ID NO: 9261 - DNA, 1270 bp, Zea mays
  unsure (1)..(1270): unsure at all n locations
tgatttaattcgaagaccctgttcaaacgttcatttgacccgcggatatcaaagctgtgctggccttccgtcctcggcacgtaacgtcccacgagccgcaccgccaagccctccgcatcgcgcacaaaggcggccgggtcacggtttcgcagattcagtgcgaaggcaggactccgcaccatctctcctccgtgaaagggcatctggcgagggcatacttcgcccaacgcccaaccatgcgccaagggccagaccccgtacgccacaaactcttcaaccaaatctcgaccgctgctctgaccggcggcgcaccgaagggccccttcgtctgcgtcatcctccgccacttcaaagggcggatacgccgagtaaaaatgagagcacatctcggacacggggagcccttcatggccttcgacggtaccctcagcaacgtaaaaccaaaattcattccaattgccccacttgttgcgggcgcaagggaccaactcgactactggcattgtggtcttgccggtcttcggcgtgaatgtgcatgacccgaactgggcaacttcgtccccgatcatcctcttctgccaatgcaaacaatagtacttcgcaaaaacttcgaccgatggctgtccgccgtacgaagtcgtcgcccaaacatacttcgacagcgccactatggcgttcggtgtcactgacggaggccctgatgtacgtcgccgccgctctctcgtaggcagtggaggccgtgccggtgcagcagacgacggcgatctcgttggtctctccggggatggtggccagtggtggctgcgtggtttcggccgatttcttcttgaggtccttgagttggcaaaccacccgggctagcaaggtggccttgtccatctgttcacgagcagacgacagtgacattgctgttaatcatttgcggtgcagtactgattccgtccgtaaaaaaaaaggatttcaactgtgcattaagaaaaaaaaactgcatgctcggctgcaacttatggaaccaaactctgaaacggcaagatgtgcagacctgactagcgtcagggatcattctcctcagcgtcgcgaggtgagcnttgttcctctcccgccgccgcttctctgccgcgctgtggttcttgagggcgggccgcgcctccgccgtgcttagatcccccccgctggtgtctccngcctggtcngnggcggcgaaaccgaactggcaggccacgcagcagtaccaccgtacgctgaatgaagcgcccggccgccatgttca

SEQ ID NO: 9262 - DNA, 742 bp, Zea mays
tggctgcagttcggagatgtgcctagcgaatctctccgtttgctattgtcttgaccttgcagattccagccgaggttgtgaagggcacatctttgtagcacgccacgagctcaccgttactgtgcagctcggcggccagcttctcccacgtcttgctcttgccactgagggaagcctcaggctcccccgagtacccagcaaaggtaacacgctcgcccacggcagcagattcgggtggctccaccaactcaacctttacaagcgtagtcggaaatcaaaatgactggtactgtgctgtcttacattgatggtttccaattgagagctaaaaatggttcggtgtgaagttaactgtatttgaaggttaatatagatgactcaccttcgtgtggtcctcattcgatgcagccaaaaccattgcatgtgattttataccacgcattgccacaggtttcagattgcagagtacgcaaactttccggttctgctaatccatagtagatgttaagtgatacagggcatcaaaagacagtatctagaaagatcaaaatgatgcttagaaagggcaacctgcatttcttcgaggggtatgaatttgacgaggccactgaccactgttcttggtgtgtcctctccaacatcaatctcctccacgtaaagggaatcagcatctggatgcttctctgcttttctgataaggcccactctaatatccaattttgcaaccgtagtatcagcctca

SEQ ID NO: 9263 - DNA, 682 bp, Zea mays
tgaagatcttggatagttccaatgttacttgggataacaccagttattttatttatggacaaattgagtgcagttagaccttttatgttactcagggtttgaggtatgcttccatcgattgagttattatccaatataaggtattgcagcacagtgcattccccaatactctcaggtatctcgccagacaatcggttcccagacagaactagctggttcaggttccccaaactactcatctcagaaggaagatgtcccgatagcgaattgtatgataagtttaaatagataagggatgacagtttgaaaatctcattggaaattgaaccatcgagggagttctttgataaatcaagtgtcaacaaattcgacatgttgcctatgcttgctggaattggcccccccaagttgcaatgatgtgcatcaaagacatttaaccctttgagatttccaatagataaaggaatgatgcctgacaagtcagtgctgaacaaatccatctcagtcaagtttcccagcctgccaatgctatctggaataacccctgatatgaaagtacttgacataccaaggacttgtaggttgagcagattgccgatggccgatggtatgcttcctgagatcccagatccatcaaagcggagcgtctgtaggctagatagattcgctattgaacttggca

SEQ ID NO: 9264 - DNA, 701 bp, Zea mays
gctcggtacccctgcaacaagtcagtggtaacgttccaggataaggctctcaggttgcaacttgcaaggctaatcaacaatcaatcaatatacaaaatatattggtagtagtagcgagcacccttcattcccgaggagcaaactttgttgacggtggtacatggcacggagttgggcaagccggcgccaagggctgcctgccttgccggagcctggccaaggttggcgctgaggacgttgcccatgaaaacctcctgcacgagcgccgggtcgaccttcgccctcttgagagcacctgggatttgggagggaccacacatgttgcggcaatttgttgatgggttattgctgatgcggccaaaaacgtcggagccgagcgagtggcgcgaaaggtacgtaccctggatggcgatggagccgagcttggtggcggggagggacgacagcgacccgagaagtgcgccgatgggcgtgcgggcgacgccgacgatgcaggcatctcgagccttgagaccctgactgtcaccactggtagtagcagccgagctcgacgacgccatgatcgatcgacgggctgatcctaataaggaagccggagatgaagatgcatcactggctcactgccaccggcgacgagcgcacccaagagagctgcgagatcgagaagaggaagcagagttcgtcaatttcatgcgacggca

SEQ ID NO: 9265 - DNA, 1245 bp, Zea mays
gtgtgtgtgtgtgtcgccgccgcggcaaacgcgaggtgtctcgagccgtcgggcatgccggcgccggcgcccgctgcgcgagcgctcgtggtcggacccggacccgggcccgcccagtgacgagcccgacttttgttgggatttctccggacttggtaaccccagtgccctgcgggacttcataaccgcatgcgactactgcctttccgactgttccgacggtagccgcagtttcggcgacgaggactgcggcccaagtcgcgaatgtttccacatcgatctagggggtcccggcgaaggcaaccatcttggtataccggaaaacggtgatccccctaggcctgcgcctcgcgttgacatccttcgggagctagctgtggtcccagtccctgcggggggtcaggacacacagctcgagcaaatccgcgagatgcaggccaggctcgacgagggagcaggaacacttgagccgttccgccgggacatcgggcaggagtgggcaggccaagctccggccagagaagcgtgttatccaccccagggcatccagcaccgcatcgccgacgatgtcagggcaaggctgcccccggcttccagtggggtcggccagaacctggctgcagcagcaatactactccgagcgatgccggaaccatccaccaccgaggggcggcgtatccagggagagctcaagaatctcctggaggatgccgcggtccgacgggccgaaagctctgcctcccgaaggcaggggtaccccctggagcatcgcgccgcgacttcccgattcatgtgggaagcctcggtccacaccgggcgcacgcggaacaccgcgcctgtagccccgggtcgcctcggcaacgagcaccaccgccgcgaccgtcgaacccacctcgatgagaaggtgcgccgaggctaccaccccaggcgtgggggacgctacgacagcggggaggatcggagcccctcgcccgaaccacccggtccgcaagctttcagccgggccatacgacgggcgccgttcccgacccggttccgaaccccgactaccatcaccaagtactcgggggaaacaaggccggaactgtggctcgcggactaccggctggcctgccagctgggtggaacagacgatgacaacctcatcatccgcaacctccccctgttactctccgatgccgctcgggcctggctggagcatctacctcctgcgcagatctccagagggatctactagagtcgctg

SEQ ID NO: 9266 - DNA, 988 bp, Zea mays
cagcaccgcgtggtaggtccctcggaacccgaccacctcgaacatgagggtttccctgcggaagttggagggagttccaatcagacgggcaaatcgagttgtccaaggggcaggacgcgctttcaggggacgatcccgtgaaagggcgccgcaccggcccggatcgtggacagatcgatctccaagagcccgagggtctcggcgtagatgatgttgaggctactgcccccgtccatgaggaccttggtgagcctgacgtcgccgatgatggggtcgacgacgagcgggtaccttcatgggctcggcacgtggtcggggtggtcagcttggtcgaaggtgatgggcttgtcggaccagtctaggtagactggcgccgccaccttcaccgagcagacctcccggcgctcttgcttgcgatgccgagccgaggcattcgccgcatgcccaccgtagatcatgaagcagtcgcggacctcggggtactctcctgcttggtgatcttcgttcttgtcgtcgtcgcgggccctgccacccttcgggggtggcccggccctgtggaagtggcgccgaagcatgacgcactcctcaagggtgtgcttaacgggcccctgatgataggggcacggctccttgagcatcttgtcgaagaggttagcacctccggggggattccaagggttcttgtattcggcggcggcgacaaggtccgcgtcagcggcgtctcgtttcgattgcgacttcttcttgcccttcttcttggcgccgcgcggagtagacacctcgggagcctcttccgacgggcggccctggggctgcttgtcctttcggaagatagcttcgaccgccttctggccagaggcgaacttggtggcgatgtccatcagctcgctcgccctggtggggggttttgcgaccccaacttacttaacccaaggttccgcggcaagggggggaatcccttttaagaggttcgaaccctgccaggggc

SEQ ID NO: 9267 - DNA, 729 bp, Zea mays
tgaagcacccttcggtcgtctctagagcatccccctgggagggcaactttggttaaatttgtgcttacggcagtccctatctaccatcttatagcacttcagtgccccaaatgggttgtcaaggcaatagataaagtctggagaggattcctttggaaaggaagaactgatatcaaaggaggtcattgtgctgttggttgggctaaggtttgcaaaccagtgaaccaaggaggtctgggtctgcacaacttggatgttcttgggtgggctctaaacctgaggtggctctggcttaaaaaaacacaaccggacagaccctgggcagaatttgacatccaaattcatccaaatgcagcagcccttttttctgcttgtgtgtgttactatgttggtgacggtgcttcaactctattctggacagatcgctggcttcaggggcaatcgattaagaagattgctccatctctgattcgtcgtatccccaaaagaatccagtttatcagaacagtccaagaagctttgatcaatagcagatgggtgaatgatatcaggggtagtctgccggaacaagttctacttgagtacttcaatatttgggatttgatttagggggttcagcttcatccagaggttcctgacaggcacagatggctacctacatcctcaagggaatactctgccaaatctgcaaataaccggtttctagttcgatcaactttgtttgagcca

SEQ ID NO: 9268 - DNA, 712 bp, Zea mays
tggtagcaagttcaaacaaaaataaaaggtggagtcaggcgaagacaaaagcagtcccaaaggccctgaggagcctaccccgcagcaaactgcagaatcatcttctgcatgtcctctctgagatcgatacttgaaggtttgcgcgtctgtgttacctagagggtttctctagacaaagttcttttaggccgtgtttggaacacatgaatttcaaggggttcgcatataaatttcacagaaatcagctcagatttattcgtgcatgaaaaacgcaggaacagagggggggaaatcgtgttccagacaggccctcagtgggtactatatatagctcgctgtcgaacgggcgggcggcttttgtagtcttcataatagtcttgtttgacgaggaagcttccaggtatctattttccagagattattctgtgtcacattgtccatcttctcctgcattggtctttgtttttcttggaatatatcaaactagatgaatacccgtacgttgctgagtgctgacgcactttcaccccccttgagttggaggagacgtctatactagctctgcataccaacagacaaaaaaaatggagttgaagaatggccgccactctgtttggtggatagcaagaagattctcaaccaatgcaaccaagctctaaaatttcaggaccgtgactcaagtcactgggtcattcaaaccatgacaaaatca

SEQ ID NO: 9269 - DNA, 1493 bp, Zea mays
ccaatttttcaccaccagggaaaaccagctctattgccccatgattttacgaaatttcgagctcgggtacccctgagcgggagcctaagtagatacctactgactaatgggcctttgtagttgagtcaccgaaacaaggaaatttagtggggtctgtggccccgctcggctctaggtccgcccctgaccgaacatgctcaataacctgtcagtttctttgcacttcaattttcttggcatgagaaaatgaacccctttccactagatcactgtgaaatggagccagagatatgtgttgtattctagcatgtggtatatcagtcgacggatgtccaatccgttcaggaagcatcattacaagaaacaactttctggtattacagaatcctggtgactcgattatgattggaacactcatactgactctcatagagtcatagtacaccgcccccgacaccctatctgcgatacaggccacctctgccagaggaatgccagccaccacgctgctggagtacaacttaactgcggaggagaatccattcctgttccccatctccacggggtggtggccccagcattgtaaatccttgtggatttggaggctggccaaagctgccttgccccataggattcgcaggcattccggtttgctgcatgaactgaggaaagggcatccgaatttggtttgggaacccaccgaagttcttgttctgaaactgttgccgccttgccggaattggttggctcctggtccactgaagttatggtctggaactgcagtcttcaccacttcctcaagttctcaggcgtacaatacagtacaggtgctttgcctattatccaggttcactcagagctgctgctttctgatgctttgtgcaggacgttagtgggcaacgggcatgttaacacgctaatcacctgataaagttccccatttgtgcattccacctagcttcttagcatgcaatctttaccgtgaagttgcattgatccaaccaaaagcgatacagtgcaaacaatgccattgttgcatgcacaacaggcttagcctgcaacgtgtacagccacagggtttaagaaaaacaagaagtccacaccaccggttctctttttcacacacacacacacacaaaaaagaactgacatgttttagtaatatatcttgagcaggaacatgggtgaaaagtgaagcaagccacaagaaaaaggactgcactgcagatgggtcagaaagttccatgagaacactgaacacggaagttctctcttcaggttcagggttgaagtgaaccaagatccaagaaacctttagttgacagacgacactcgtagggataggaataggatcatccggtgggctgaattgggcggtactcatgccggcctattggacttgacacgtgtttctcggcttcgcaccaacgaggacatgtttcatgggtaacactcgtcggcatgctgtacttggccggcccacttgtgtgttt

SEQ ID NO: 9270 - DNA, 733 bp, Zea mays
tgctcatgctcctcccagtcccctcctcctgcccccaatcctcttccgcccctccctcgggcctcttccccatctcctgatcacactcgctcgcgcgccatgggcgggccgcgcctcccgccaccgcgcgcagccgcacgaccagtcttctcaccctcctcctcggccgccgcccaagcagcagcagcagcagcagggccagcagcaccccaacaaccgccccaacaagcccaagcagcagcagcagcccccacctccacgtcctccgccgccacaccaggctccccccgccgcctcccccgccgccccgggcgcggccaccgtcggccgcgtgctgggccggccgatggaggacgtgcgcgcgtcctacacgttcggccgggagctgggccggggccagttcggcgtcacctacctggccacgcacaagcccaccggccaccggtacgcgtgcaagtccatcgcgacgcggaagctcgcgcacagcgacgacgtcgacgacgtccgccgggaggtgcagatcatgcaccacctcacgggccaccgcagcatcgtcgagctccggggcgcctacgaggaccgccactccgtcaacctcgtcatggagctgtgcgagggcggggagctcttcgaccgcatcatcgcgagggggcactactccgagcgtgccgccgccgccctctgcagggagatcgtctccgtcgtccacagggggatcctctagagtcgtcgg

SEQ ID NO: 9271 - DNA, 785 bp, Zea mays
cgaatactagctcggtacctctgcaacttcacaccgagtactgctctgtaggactacaaattctctttgctcagattttttttacccccggttgtatcgccgttaggcgtaatggatgcgtccttttgctgctcgcatgtgctatgtacgactagcaacatttgcctagcatttgtaaggaaaggctgttgtccctgaacttggataaataaataaataaatggatctaattaggtatcgcgtgcctatcacaatgttcacgttaagagcagatttaaatggtagtagggaaacatcattttcagttgggcaaccaatcaagcctgcccgagtttcgtgtcagccattgcttgctttgcttgccacacgggcctgtaactggaatacgatgtttagaatgggcagttacatttcaatactctgcgagtaagcgatcgttgtcttagttttcttcatatgtaagtcagcaagtgacatctgtaactcctgtgcgatgtgactgtgattctgatgtttcttgtgattgattggtagatgccgcgagaagcagcggaaggaggcctcgcgcctgcagactgtgaaccggaagctgactgcgatgaacaagctgttgatggaggagaatgacaggctgcagaagcaggtctcccgactcgtgtacgagaatggatacatgcgacagcagcttcacaatgtgagatccatctcccttgctcattccccagaacatcttatttatattattttttctagataaatcagagggatcctctagagtcgtcctg

SEQ ID NO: 9272 - DNA, 797 bp, Zea mays
tctgacgccccgtgccgcgtcccgcgtcgacgtcgtgccctccggtccggatttggctcgcacggcggcgccgggctccggttgcgcgcgccaacgccaacgccaacgccaatgccaatgtcgtcgtccgatggcggccagtcgcgcaagaggctcgtcgtcggcgtcctgtcggtgtgcctgctgatcgccatggtcatcgggacggtcgtgttcttcgtgagcgagaaggctggctacaactcggagctgagcaagcgcaacatgagcaagacgatgcgcagcgtggagctcttctgcgcgcccgcggactaccagggcacgtgccacgagacgctggaggcggcgctgtcgcggacggacccggatgagcacccgcacgccgccgcggccgccgcgatcaccgccgtggagcgcgcgctggcggaggggttcaaccggtcgtcggtgctggacgcggtgcggcagagcaacgacaccctggtgtgggaggccatccacgactgccggatgctcctggaggactgccgcggcaacgtggagcgcgcgctgtccagcatcgcgtggcgcggcgtcgacgggcccgcgcaggacctccaggcctggctcagcgcggtgatcacgttccaggggtcctgcgtcgacatgttccccaagggagaggtccgcgacgaggtgaataacaccatggagaaggcgcgagaggtatccagcaacgccctcgccatcatcaagcagggcgccgccctcgcctccatgctggaccttcacaccagcctcgacaagggcggccgtca

SEQ ID NO: 9273 - DNA, 816 bp, Zea mays
tgcgtgggcgcctgcgcaggcctgtccattcctgcaggagcaggactcgcagccgacagccgagccggactctgctgaagctggctggctgtgcacactgcacagtgagtagcaccgaagcagagcaggacagtctagctggagcctggagagcgagcgagcgagcgagagagatttatgatgagtggattggagaagaaaaggcgggcaatttataggatcccatgtggcgtggagcggactccatcccgcgtctactcttttgcttaaacagtgtgattccttctccgattcgacatgaccccgtcccagtccgaaacaaatcttgcctaaatctcttccccccattgctgtcagtttcaagatggagtactggtaattgcaaactagagagagagagagagaggaaaaaacaaaaagaacaagaaagagtcataatttaactcaaacaacctaatctctgtcttaaatttagccgcaaacgaacccaactcgttctgggagttctccttcgtatacgctcgcttcgctttcctggaaacgaaaattttcttcttgattaatatttttttttcatacaaagacaatgttatccagatgtgccgtcagcagcagggcatagcatggaccctgacgtggcaaatcgggtggagaaggccaagcctgattgatgtggcctcttgtaaatgattgctaaaagaaagaagggttgaaccaacgttttggtagttggaaatgctatccaacgcatatctttttaaaaatatatatataaagtgatctaacatatggataccttcgttgttaatcaacagc

SEQ ID NO: 9274 - DNA, 831 bp, Zea mays
tgacaaggttacagaaaaaacttacagaagaagcaaagcagaggtacggaaaaacagagttaagaggatcgcaaccaggggaggaacccaggcgacagccaacactaaaggcagtaaacactgggatgcttccagaatccagaaggctgacagcaaacagtaaatacagcagtaaaacatggagtcgaaagatgaataggaagcattgctaacagtcctgagaccttttcttttccatacacagttgttcggttgtctaggtacttattggaacacaataaaatctgacaaggtaacttctgagctgagaagattcattagtacacacacaaattgaaagataatgtcgagttgtaataatatagtgttacctgaataccttctgagaattcaacctcttccttggctgtaagaagtctcctaccggtcatcttccacaacgaacctaaaggattcatactagacgaggaacccttggaccgcttcttctttgaggataatgcaaccttttgtgaagcatggagggttgtgctagcttttattgctgctctagttctcctagcttttctctcagattgacgagcagatttcacagctatgttctcagtatactgcgcataagcatctaattcatcttcagcatccatgataccataagagtccagatactccatcaaaggattattagcatacatgtcaggactgctcgatcgcatctctgtgcgaaggatttcatttgccaagtagttgtccacacacttttttggtctaattaccggctgatggttgtttctttgtactatctgaacaacttcttgggcagcttcggca

SEQ ID NO: 9275 - DNA, 798 bp, Zea mays
tgaagtctgcactctgcactcgtgtagaatgtaaaaagaatgtaaagaagtatgaaaattacaagggacaccgtgtagaatttaaagttttgtacagagagagagagacttgcatgccatgccaaacgaggatggtttcatcaagtagagaatatataatagttccaagcccaactcggaggaattcgttcaatttgtgcaaatttcataagggagttgttatatttcaggtgtctaaatatttacggactttaaagaaataatctcatacgatcaactactacaattagaaaacaacttacaagagataatttacatttctttataaccaaacaatggcaaaattgcatgttatataaaaaacacctgagatatagaagtgatcgtataaagtctatggttcatatacatatgaactaatggatttgtggccttcaacgtgttcttattgacactgatgatttcgttcttcccaagcgtcgaggacaattcttaagccttcttcgtgaacaaggcatgatagatttctaatagcagaatctcaaccaaacaagtacaacgacagaatggatttctaaaagaactaaagatttctctaatttaattcagaatctcatcctagcttagattttttatatttctgtcatctatgttaccaagctatcatgctcttatagaatttatagttgacagttgtttcaaccaactatattttagatttttttacaaccgtcaacttgaaataattttctcacatctcacatatagaatcacatttttatgaatctacggaggggc

SEQ ID NO: 9276 - DNA, 782 bp, Zea mays
tgagtgacgaaaattacagtgagcctctgtgtgagctctgtatttcccaaattgaggaacgcaacgcaacgcaatgctcagcaacttgtactcctcggaaaaaagatagagagagagggtaaagtcacatcgcatgattaacgcgtatagcactggacagaacattctcattgtgcctctcatcttttgaagcatctgccctctgcgtaagaatgatataatcgcgtggcaaagagagggagggaccaagaaaggaaaagagaatgcatgcatcggacgtcttaccatgggggaaaaaggatggcgtggcgatgttgtcgcatcgcacgtctcaaatcctcagcctgtggaaccatctgtgcgtacgtagtacgtattctactgtatggcgcatcagcagagacaggacctatcaagacagtataggggcagtatactggcagtacgtatctactgtatgtgcgtacgcacgatgtaaggaaagaagagaaatgacctgtgtctgaaaaaggcgtactctacgagtgcatgacatctataaacagctatacaagctctccttttgtggctctacttttcagtgcaatgtgccttgtgcattcctggcgaatgaatgctcctcccatcatctctactcctatgcatcatctctacgtacttatatgcaattatgcatgccgcttttaccaaagtcacgactaacgagtactgccgcttatttcactatcccaggcaacgggaaaacgtgataacaggagtcgtacaccgtcaggggtaccgag

SEQ ID NO: 9277 - DNA, 795 bp, Zea mays
tgcaggcgcgccaacgccatgcactgcacgcatgcggcatgcagatggcagccgccgcgacggctggatggctggaggctggagctagctcaccgaacttggcaggcgacgtcaccatgtcgatgacggggccgaagaagtcggcgtagacgacggtggcggcggcggcgtgcctggcccggagctcgcgcaggccgtcctggagcagagcgttgtggcgggtggccacctcgttgatcgatctcagacaccccgtccgcgggtcgtagcctgccgggtcggggtcggcgaacgtggcgagcaccggcggcgcgcaccccaccgggatcacgccggggaccaccacggttgccgccccgtgctccacgatcagcctctgtaagtgtaaccaacaccgaccggctcaccacccgcgcgtcaccggcaatgcgcgctgcagctagcccacatgccacacagggagtcaggagggacatgcgatcgaagtggtagcttcgttacctcgacggccgcggagatggtcctgacgacggctggcacgagcgacccgacttgttcgaggctcgtcgcggccatggcgaggaggtagtcgttggccccgaacgcgcccacgaagaagagcgatctgcgcaacaacctgtcgcagcctgcatgcgtgcgttcagagcagatgcacacgcgtcagttcatgttcatctgtgtcgtcgtggtcgtggcctcgtgggtcatgcaatgcaacacacatgcctttgggcgtggcgcagagcgagcgcttgagcgactggaaccactgca

SEQ ID NO: 9278 - DNA, 797 bp, Zea mays
tctgcgagtccaagattttcaagatatttagcaccagccttctcccaacagatcaactcatcaaaaaacagtcttttaactcgaacacgtgggagaaccacgtatcaatatattaagaagacaagaaaaaaaaagtctagaaaagaccccgtacaaaggtgccaagaaagcacccaagggaaaaaacaaaaatcaaactacagccaaacctgcctaagagcagcggccccaccaaggccccataacaaagcctcatcatggatggacagcaaaattgcgtggatgtttggggaagcattgtcaaacacacacgcatttctatgcttccaaatctgccaagctactaaaattacaatagagttgaaactttttttcttatgcttagacacaaatctttctgcctcactccaccattcctgaaaccctgtagcatcagacgtgggagcaagatgttgtagtcccagcctgcttagcattctaaatcatacttccctcgtaaagacacaagccaccagcatgtgatgcactgtctcgtcctgctggtcacacaagggacaactatctgggtgatccatgccatgacgcgctagtcgatcagccgtccaacatcggttgagagatgcaagccaaatgaaatacttgcaacgcgggggccccaagtcttctagattcttttagcaggctcaaaggttgttgcaccaccatggaagcgcatataaccagaactggccgaatacagccccgaggaagatggcatccaccgatgctggtcctcaacattaggaatttaggatgca

SEQ ID NO: 9279 - DNA, 803 bp, Zea mays
ctgctgcctgcggccgtctctagaggatccccctgcatcggctcggctcacagacatgcacgttggccttgcctgcgcgtgcgcagcgcgcacgtagtcgtaggccccgtccctgtgcctgtcctttcacctcagctatagctatagctactattagcggccggccaggatggatggatgcgtggtcgatccgtcgatggaagaaggggtacgaacgggtatggtcgcgctcgcgcggaggagcacctgtcacatccatgccccgcgcgcatgcacgacgtgaaggtgccgatccctgtcacatgcatgtaaaaaagtatcattgtctgtcatactaattaagtatcgttagatctgtcatacaatgtcattttttacaataataatacggcatacatcagtgtacaaactcaagtaaacttgaaccagtcttaacttcttgcgaactggacgcgtactccagtaatatgcatgccataggactaaggtgactgccgtatgtcttagttctgtatgctgtcagtttacttgtgcgcggcgaagcaacagaacggagagtacccccagcacagcagcagcacagtataatcctgatgcgtaccatcaaaacgctatgctatgctatgctatgcaaatgcatgcatgttttgtcatatgaacagagagatcgagcaccagtacgagctagcttttgctacgtggctgtaacatcacgctgcagcatgcagcaggggcacctcacctctggatcgtcaagaagaggccaagagcctgtagctagctaggccagggctgcagcagca

SEQ ID NO: 9280 - DNA, 836 bp, Zea mays
gggataacacatttttcccccagggaaaccaggctaagcccatagattttcgaattttcgaggtttcgggaaccccctgcaaaatcagagttcttattgtcagataaaagaggaagcagtctgttcgcaacaacatttactcactcttgattatacctcataaattcaaggcatcgatttcttatcttatgtgaaaccggttgtcggcttaaatcacgtcactaaaagaaaagaaatatatatctcaacatctgatactgacgaagccattcttctttctatattttaagcagagtatatgactactacagaactttgaccagtaccaaacaatcggctgcaaatgcatggctacaacggaatctcaacacctcgctgcaaatgccatcaccctcttctctctttttcgctgtaccataacaattgactagtacacaatttaaccaataaatcctcgcagacaaagaagcggaaaaaaagagaaactaagaacatcgtattattcgttcgctgtgaactgaatagctccatctccagaagacaaaagtgcagagctataaacgctggagggagcaaagccatggctcctataagaggagctgatggtcacaagaaagttctcagtcttccgcggtgccatggccacgaggcgaggcctctgtgtcaccagcattgtcagccgccaacctttcctcaagaaccctctcgccacgctccctggaaataacgattgagatggaattagtcagctcgtaaaaaagcgataccaagagttgtttctgagactccagatattctcgataacacagttttggtttccaaggggtaccgagctg

SEQ ID NO: 9281 - DNA, 786 bp, Zea mays
tgctcaaacaggtaggatgggcatttgatttgaggcagaagtcagtgatgcccaaatgaattaattgttgagaaaggcagtgagccacagagaaaaaaaaaggataaatccagcatctaagagcatctccaacagcgtattctataaaaatgccctacaatttaaaagttagtgtattttatatgatttaggacaccaacaaaatattctgctccaactagtaaaatcttaattctagattataaggcagcccactagggtgtagtataattgaggcacttgagagagtgttctatatgtttttgacaaaattttacaaaatgagacacttttggggtagtttttcctgtttagagtcatatatttcaatttaagacactagtttgagacattgttggagatgctctaaatggctggcttatgaagaatgaatgaaggcacagatgccaagaacaaaactaaaatcactcaagcatctagttgaagaacatgagaattgagagataataacagatcaacagcacaaacacagcccagactcttttctcgaagcgttctgaaccaaacgaagctgacgacggcccagttccaaggtgcgagatcttgggttgtaagggccagcactgtccagacgattttagtctcagacataacttcacccactacgaggtctaagtgcacacagattacagtcaccggccgccaatgccgattcagcggccaggacggatctcggagcacggatacacagcgaggagccaccagggggatcatctagagtcgacg

SEQ ID NO: 9282 - DNA, 837 bp, Zea mays
tgcgccgccaccgtcaccttccacgtcatcaacttccgcaccgatgtcgagttcgtgctcttctccggcggcttccggacgccgtgcgtcctcaagcggtccggcgcgctccggttcgccaaccccgccagcccgctctacggccacctctccagcaccgactccacggccacatcggtgagcaggcccaccgtttcttcgtccattctacggtgattttctgccaaactgtatctgagcgctggaagcaatggttgtcgccagatgaggcttacctgggtgagcggcgacgggaggccgcagcaggttcagtacggaggaggcaagtccgctacttctcaagtggcaacgttcacgcggaatgatatgtgcagtaagttgtggtctcgtccatttatcacagagagcagacgttactaagggaaacgtgactgtgtttgattctggaattgcttcgacgaacttatctcgatgcaggtagccccttgttaccaagccctgccaaggatttcgggtggcatgaccctggctacatccacacggccgtcatgaccgggctccagccttctcaatcctacacctaccgttacggaaggtaaagtccttttgtgactaagatcctcacaaactaaacaactgatcagcaatgcttcagaattagaaaatgccatggatgttcggaaagtttctaactttaaaatgtcagccagttctgtagtaacattctggcaaccaaaggagagatggatgtttcatctgttcacgcagtttttgggtttgtgcttgtgcagtgattccgtgggttggagtgacacaaacacattcagaatgccacca

SEQ ID NO: 9283 - DNA, 827 bp, Zea mays
ggaaccagctatgcccagatttcgaattcgggctccggtcccctaagctaaaacacccacccagtggtggtggataacctgagctcatgcaaatatatggctactacaagtgaaagtatctcccggcggaacatgtacaaattgaatcaaacaacgcagaaagacacactttttttcataatgcgagatgcacaggagatcgagctagccaccgtggttctgctcaccgatcttcagcgttgcatactgttgcagcagctttgtaagatgacgatacttttgaactaattcaaccaaaacacatagcgacgcgcgcgcgcgcacacacacacacactcttctaattaagcagtggttaccacgggcacggggtaggccaggccaggccagggtgcttggttttcgaccctacctgttgtggagagcgtcggggcagcttggaatctggcgcttgtcgtctccgatccaggcggtggaacgcggtgctgagcggccggcggcggcgcctgcttgaggtctcgggcggtagcccacgacgacgggcatcccccctgcggcggccacgctgcttgttgctgctggacgccgcggcaatggaaccgcggccgctaataatttagtgtcgtcgccgtggaggcatgatgcccacgccaggaccaggcacatgacgatgggtgccacagggtatcttctctgcggtctcttattcgtcgcttgcatcgacgtttgtgctagctctttctcagccagctctgcaagggagagacagagacagagagaggagcaggaggaaggaggaagaaggaagaaggattagctgcaaaaca

SEQ ID NO: 9284 - DNA, 790 bp, Zea mays
gaacagcatttttttcagcctgtttcttattcttagcaggatcacctgcaaatgtgataccagctagctctactgtgcatgtgaaaaccggaaggtggccaaggccagatcgctctgttgtatacaatggcaatggcgccccaactctttgagccacttcctgcagaagatttttataaacccctgtttcgtcctgtgtaacataaatcataaccataagcaagtgaatgaaattactataaatcaatgaatagaagctgaggatgcaacatcctatgaagaataaagaataatcaatcaataaaaatattaaggcccaacagtcaggtgctagaaaattttttacagggaaaacaaaagaaattattaagggcccaacattatgcattttagttagttaaaagctgttattactgaccattgaaacaaaagtaattgaatcgggaaaaaaaatatgggcctctatagaatgctaaggaagatgacttctcaatcaagacaacgctactcacatagtacttcgaccgcaaggattatgattcaaacgattctcaaataagttgaagtggtagttgagctgtccactaacagaatataagaggcaacgattacaaagggacatctactatctgctaaagtactaatccaattcgcaaaaccgtgattcagttcaaaaattaaacaagcagataatggatataagctggccaatataaataaaatagcatttcttttagatcagttctcagtatactggtacaaaaggttttagacaataatgccatcatca

SEQ ID NO: 9285 - DNA, 723 bp, Zea mays
tgctcaacgaagtcgcaaaaacatgacagtccaatggatggtcctctgctgtgatttcaaggaccagatggaagaggcctacgaacaacactgaagaaactccatgttcctgtgctagtcttgcacaaaattgcacgtagctgacacataatgtatcttgtgcctatttcattgtgcagttgatgagacctggaaccacaatttacttgtcaaaactagaactaaacactgccatgtgctccaaccagttcgtcgagaactttacatgaacgctccagggtccggagcacagacaacacgggaaaaaaaacaagcatatagtgttttatgccactgctatcctcggccgtatgaagaagaccccttggatgccatcggtcttctcttctgttgagcccccttaaatgtggatccaggtccaacagatcttctgcctggtctgtttctagggcgttcttcaaacgattcttcggatttcgcaaaccgcctagcgtttccttcttcagttcttgaaaacctcctagcattttcatcaacctgttgcttctttttcatcttgctggtgctaggcctatacagaataacagagcgaccaatttggtcaacagcgatggatcctgttgactcctcaagttgcagtatcacatcaggtagctccatagggcagttcccatgaatttttagctgttatagtgtaggaatcttggtgagaaaaaactaaca

SEQ ID NO: 9286 - DNA, 817 bp, Zea mays
tcgacccctggttgggttggcacatgaaataatatgtgccttgctttctctctgcaggtgcctgatgagatagtggacggacaaggaagtgaagtttcttgttctatccacctgttgaacttaccaacttggtatgctggagtgcaagaataagagcaggcccaatcgcttcacagctattgggttctcggtgccgactgtagcagccgcagatctggagggagcagcgaaggcgttcatcagatgttatccagtgagcacccttcaggcccctcatgttcctccaagtctggtggcccgggtgtgagcgctgatccggcgacgtccgcagcggagcagccagcgtgccaggatcccagagatctgatccaatcgtatcccaagttctccataaggtgaaagatatatgtgtatatacacctctttgattcaatacctttggagagagattatttttcggtgtttaagttcttgatgctggatctctgtctttctgatgcgtcgattaattattggctgctgctttgagggatcggattgggtatgaatggttgctttcagggttaatccgtgttattgtccgggggtgtttaattagtttaattttctgctgattaatataaaggtggccttttttttccaccccagaatctgaaaataaaaggatgctcctctcattaatctttgtccactgcctactattggttttcttttccatatacgtggtggttctgcgataaacaggcaggcgacatatttttggagatttcagttttgatatgacagcatgttcagggggatcatcagagtctcaaac

SEQ ID NO: 9287 - DNA, 780 bp, Zea mays
tgatagcggcaaacactctgacctcaaacgggcaggtctgtcagaactgcggtcatttgctagcgcatgggctctctcaatgaccacctccaagatctcttcacaaacaaaggtgttgtttggaaataaccggcaggatctcatgtagagaaaccctggagctacagcaagcctgtgtgctttttcatcagaactctgccccagcagattcgcaactcctctgtttgctacggagcaggagcgcccatcaaccaaaggccccaggaaagacgagaagcagctcctgatcagttgtgccaccgcggtgttatctcgagtgaagggggactgcgaacaagtcaggatgataaaatcatgccaccgccgtgccttctgggaccacaatgcgcctataatttgcatagtgggccatgaactagatgtcgcacaaatttcaattccttgggaaatgatgccgtgtaggtggctgaattcctccatcttgactgttattgacaaactcattagcgctgctattggcaatggaagcattggcatcgcagaacctgcagcagaaggattgagtgcccggttaatagtgtgatatgagatgcctgagaaaagttagtactgccttaaatactgaaaactaaagattgtgatgatgtaaatctacggggaaaaaacgaacaaattacacaaacaggcattaacatacgtggacgtggacagatattgatatgaacaccagcaaatgcaagagcttcttttatctccgattcaactactggaagagatgca

SEQ ID NO: 9288 - DNA, 853 bp, Zea mays
tgcgcgaggtatccgtctgtcaaaagtagcccataccaaagtttcgtggcccaaatcttagcttgcctggcaccgtttcgcggtatccgcctcaaactgtcgcggacggcggatcgctggatgcattgagcagacaaaggaagctgaacgtactagtccacatctctccggagtacgggatcgagatgctacaaaagaaaaaggttgcgtcgcccggacggtgtagactacggcggggtgccgccgtggttttgctggcggcgcagatgcaaacgtggaggcgggcggagtgtgttttatggcaggggaagctgcctcccggacgaggggcaggaattcgcggtggccgggggggacggacggcagagcccggcgctcccaccaccagccgtcggatccctgcccgcccgcgccaaccgctatcccatcgcatcatggctcgccctgccgcggcgcgcgcaccgatcagcgagccactcatcacgcgcgccagagaccgtctctactctatggccaaaaggctgcgcggctggcctgcgctggtgcagagcagagcagagcggaggacaccacggccgcgtaccgcaggtgccctgctccctctgtagtacactagtaccacactgtacgcccccgcccggtgaccagcgtccccgcacggatctcctcctcttggccgccggcgccgctgatgtttccgtccctcggcgaccgccaccaccaccaccgttgctgccgcctgccggcccactgcccggctcgctagtcgctactcgccacgccaccactagccttttcggcttttcagagcccggtttcactcaccgacgctgacaggagcgctttctttcca

SEQ ID NO: 9289 - DNA, 824 bp, Zea mays
gatggcgctggtgctgttcgagtatgcagacgaaccagaaactgctgacgcatcagatgtggcgacagtacgacaagaacggaatgaatctgggaacctaagcaatgctagagcagcggccaaaccagaaccacatcagcaaatgtggtttttcacagcgatcaggaagaaaagaaaaaaaggttcggagtattagatattcagatagtcaaattctattggcctttttttttggtttggagatccatgtaggagtagatggtcggaaattgagaagctctagagccttttcaaggattgtgaaccaaacaacctgtcacgggcatattcaaacgtgttcaaacagcagaaatacttcgaagagcattcaagagggggaaaaaggtgccaccgatccgaaagccaataaactactattcgggaagtgaacgtaaacgatccaaaagacaatgacacagggtcagggtaaaatatagtattaaacattcaatatcacattacaacaataataatggtttgcatattgtgaatacacaaatgacaaattgcttaaaatggtggcaatcatgcatgttgcaatacagacaggtaatatcataatcaaagacttacacgccaagtcttattgatactcagcatagacataatcaaagatttacatgccaagtcctacagatactgagcagagcgatacgagataggcggtcagctcaaccagttggaacttggaagcatgtggtagtcgatgcagattcatccaaaaaccgtgcttccagccaaggtcagcactcagcagacagccaagctgccaaggtcagctctca

SEQ ID NO: 9290 - DNA, 793 bp, Zea mays
tgttgagagagaagtagaactagaacatcgggctgttgaggcatcgagcgctttagctagaatccaggtaattttacaaggtataattatcatcatgatctatattgcataattgcaaggatgtgaattttgaaagtcatgcaattaattatttggatgcaaaccagaaactaacacattgatgttatcatgctaagcaatgtttatttgctattaagctctcatgtacaaataattgacattttggacatgaacacattctctaaaacaactttggcccacaattttttgttataatatatttacaacacataccaacagtatatggctatgaaactactcttcaatgcatatgtactcctgtcgttttcaaatatccaaacttaatccataaaaattaatttgtaatcaaagtttgaaacaattaactccataaaacctcaggacaccacttagtcgtgaccggaggaagtaatatgtaacatatactttcttcatataattcatgatactctaatgctgatcttaattgttttgatgtcgtccagagagctgctgatcaaagctcatcaagagtgctggaattggagcacaagttggctgttcttgaggtacattcctttgcaccttgtgttttacacattaggctatgagctggtttgtttatcctggttactgtggatgttctggttatcttaggttgaatgtgcttcattgcaacaagaactacaggagatggaagctcgtaatcgccgcgtacagaaaaaaccttccgaagaagctaatcaagttc

SEQ ID NO: 9291 - DNA, 786 bp, Zea mays
tgcggctatggtgtggccccacacgtcaggcgccagacgtaaatgtaaaggaaacgcgcgtcctgtgattctggtgtaggaacatttggtaggtcacagaatgctgatgtgatgtgattgtatcaggggaaaggcaaacgattcattaaaattaaggaagtgcatgatgcgttggcgctgatcattttcaggtgctatggttgttttgtgtgtgacgacttctaatgctgttttgatatccctatactagacctgacgagtcatgatttttcttttgtgagaaatccttctgtgctacctccgtagatgagtgttgtacagaactggaagcaacaaactccaagcgtcagcctacagaatctacgccaaaaaaaacaaacaaacagtggagttctactctgtacaaccatgaacgaatcaaagatcacaggatcggcaggctaggctgggagctttgtggtctttgacagcctagccttatcctgccggcgaagttcttcttacagcagggagttccacggagctgaggtccgcagggtacggagtccacagccccaaccctcctctactctccctcagccccttctccacgatctcgtcgaccgttttggcccactccaccttagacgagtgctccctcgtgtgcctgtgcaggacgaacagcgagttgtactcgcagttggggaacatgaagagctcgagagcgtcgccgagcctgcgcgccacgtagccgaagctgatctggtcgcgtggggtgaagaggttcacctcgttgaaccagaggca

SEQ ID NO: 9292 - DNA, 820 bp, Zea mays
tggtgggcagcaagccaacaagggtgcacagcacagccgacccgtcccgttgttcatgagatcgacaggacgcagtggtcgaaaacgctgtctgtcgccacttctgacctcgcgtggtgtcccatccccacccgggagaagcaaaagtccgatgcggatgatcatctcgttcgtcaaccatccatccgcaagaggcgcagcctcaagtctttgaccttgtcctcgcgcgcactgccgagagtctcttttgcttggagccgccgtcgagctagggagagaacgaagaaacagacggagtcacgcactggccgccgcctgtacgtcgctatgagccatcctaccttgacctgtgccaacagcccataaccactgcaaggagccaaggaccaagaaaccaccagcttaaaaagtatagcaccccgcgtctactacctctggctgaggatccgcgtgtctttgctcggccggcggcatccccagctccccctttgcattgcaaatttgcaatggctcattcagagcgaacgcagtacctgaatctagcactaccaccactcctcgtcgccctactcctcgcatcactgccccaatgccagccacagccacagcccgacgacgacggcgcctacttccggtacagcaactgcgccccgacgccgtaccgctgcggtccagtcaagttcgacgtcgggtacccgctgtcggtgacgggcgtggcccggccggactactgctcgttcccggggtaccgcctggcctgcacgaacggcagcaggctcgcgatcaccatgaacgctcccgccggcgcctgggcgttcca

SEQ ID NO: 9293 - DNA, 774 bp, Zea mays
tgcagcaaccgcagcactccaggaagaaatgaaagcgctcgtggcatccgtccctgacggtgctggggcagcattcacagccatgcagcttcaggagctagagcagcagtcccgggtttatcagtacatggctgcccgagtacctgtgcctactcacctcgtcttccccgtatggaagagtgtaaccggcgcatcctctgaaggcgcccagaagtaccctacttgtaagcttcaaatctgtctcatcacatgtgtgctcttatgaaatcctgttaattttgggtagactttgccaagttgttccatgatagcggtttgtaggccggtacaatgaataaatttactaatctcatctgaaactgcccttcttatataggtttagttagttataattctaccaaaccaatgttcagtgcaatttgatgcacatgttaccaagtgtggaggcattctaaccgttcttgctaacctgattatacagtgctgggcttagcaacactctgcttggacttcgggaagaaccctgaaccagaaccagggaggtgccggcgaacggatggcaaaaaatggcgatgttggagaaacactattccaaacgagaagtactgcgaacgccacatgcatcgcggtcgcaagcgtcctgtacaggtcgttgaggaagccgagcctgactctgcttcaggctcaaaatctgctcccggcaaggccaccgaaggcgccaagaaggttgacgacaagagcccaggtagcaagaagcttgccgtggcggcggca

SEQ ID NO: 9294 - DNA, 806 bp, Zea mays
tgaggcggcagaagcagcttctctcatcgtggcgtttgagtttcagcaggcagcatggcgcatgctcaagaaattcagctccagatcagaggtactcgtatcatttgtctcctcttcttcttcctggttccttttgttgtgcctgatcgtgtgtagattttgaaaacgaacggttcttgaattcccagagtggttctttcatttgcttgttttcctcgcctgatcttgaaaagttagcaagcttttggagagtcctactacttctatgctcatgcatggttggaaactgctcgtccttgaattattgacgcgtctgaaaggtccagcttagattgccgtcctgagctaccaagagtgttggaaacaacgttctggcattgagatattcacccctcaagctatatctcaatcttttttttcattaagttgacgagttgaacgtgtttcttgttttttttttctctttttttaaacagagtggctttccactgtagctaaaaaacacaaatatataagctacagtacactaattcctgcatggtccactctggcgccattgaattcagtagttgattggtgaaagcaaactgaaacgggcagtattattgccctagccatgcccccaaaggtccaagagctcatgctacgtattaatactgcacgagggcgtgtgggattgttcggttggcatacaaagtattggaggtcgttatcaacttatcatagacctctacttcaccaagaataaatggagaaacatcaataaatgttgattttgtcctgtttttttctcatttatgcgcgca

SEQ ID NO: 9295 - DNA, 722 bp, Zea mays
tgctgacttccagatgggagatctcttccttcccgtttccacattttctgaaggtttcacaattcctcgggcagcatagatgagatctgaggaaaccccagccccaacactagaaatgaaaccaacactggcaagtttcagaccaccaaccaacactgctgcaattctttgcttgatactccaatcctggcccaagatgttcttttggaatgcattatctggcaatgatcctaaaaggcctttgacaaactccaaactcgaaccagaaccatcatcagcatactgaaggactgaaatagtaggagcaggaagccacactgtaaagaaatcaacaacagaccctctaatagtatctgtgaggacatagtcaatttcttcaaagaacctccctttccgcctttcatactgcgctagtagagtggttgttattgatatgacctcttcaatggctaatctttgaaggaatttagggtctgccaacagcctttctctgaaaccctgtagaagttgattttaaaaacaaaaattcattctaagctatgtttagacatcactagcttccaataatgcatcaaggagtgttcaaaaacctcaactaatcaaattgataggagagatgactgaggagtaaagtgaaaatggtggaataatcttacttgaaatcgatgaatcagttctgtcataacagggtatttctcgaggtcaaaaaagttctgcaatat

SEQ ID NO: 9296 - DNA, 748 bp, Zea mays
tgatatcttggactcaacactgtgagcaacctcttcatcttttgtcctgtctagaggtgccctatatgtcctccataagttcttccgagttcattccgggagagccaacagtattatcacggcttgtggaatcagaatcagaaccagaaccagaagttacaacaatatttgcatgatcttgacttgcagactcgctctcaaaagcctcgtcctgttggcttgcgactgggtgagagatcaatataatagaacttgattggtcttggacgctagattctatggcagattcaccatgatgatcaagactctcagaagtctgctctataaagttatcctcttcatcagagtatgatatcccaaatttctgcgcatgagtcaatcctggacaaacaccctatcaaaaaggatatgttaaggttggagaaaagaaaaataaacataatttaatagcgtgcagtctgaattttgggcgtgcgtgtagtgttaatgtattagatgaagagccaaaaacatagctctcttagcaagactagcatccaatcaaaaagaataaaaccagaaaaacatgatgctcttgttcatgcaacaaaataacaaagacactggatcaaggtagaaaactagcttcagatgccatattcacacaccacgttgagacagaaagccaactaccctccttgctgtatattcattgctttttaactccaattaattgataactgcaggcagaaggatcctctgaggtcga

SEQ ID NO: 9297 - DNA, 853 bp, Zea mays
tggtagatgatccatttgtcatttcttagaatctatacaatggcatactagagatgaaacttaagacatagcaggaaaaagccttgcttgtgcttccaacacattaagaaacaagaggtagttatcggtgtcacagatttgcagcattccgatttaaccatgtgcagaacatgttgttgaaacactaactactgcaacaaatggcgacatgtaatatatatttttttgctaccaagaagcaaattttatcagtaaatatgactatgaccctgcactttatatgtttgtcttgttttgttccacgtttattttacttgtatgatatatgatatgttgtgaagacttctggaatgcccatacgacatgcaacaactgcagattttcttttatttttttaaaaagttttcttccccaagtatttctcagatatgccactgcttgtctgggcatttatatttgcctgctctgctagtatggttgttctttcatattagtttatggaagatgatggatcttttaagccggaagcttctcatatgatttcatgacctcaggtccctccggcaaaataatgcttctgcctgaggaggatccaaacgcaacccatatcatgattgccacgggcaccggtgttgcccccttccgtgggtacctgcgtcgcatgttcatggaagatgtcccgaactacagatttggtggcttggcctggctcttcctcggcgttgctaattcagacagccttctgtatgacgaagaattcaccagctatcttaagcagtatccagacaatttcaggtagcaacacctcttttcacgtgctgaagctatcccaatcaatggttttcagggtacg

SEQ ID NO: 9298 - DNA, 846 bp, Zea mays
cgagtacgagctcggtaccctgtttttttgacacccaacttagtgcaccaaattcacataatcaggctcataagcgacgccgcacctacgcacaaactcaaaccccgccgcgggttacatctctccccacacccaccaaactgcagcggcgctgcttaataatttcataactttaaaattttgacagcagtggtaacaaacaaaaactccagaggcatctacataaaattccccacaagttttgtatacaatttataattaaattccaacatctaattagcccaaaacagtccacaagatgaaccctgtaatctgtttttttgtcttttggacagcgacatacccggattcaaacagcgatatcttttaaaatataattccaaatcaagcgcataagtactcattggaaagataagacaaagacctacatgattatcatactggttaacactaattacccacgaaaaattcccagaaactgctaatactactgctgttcatccctctgaaaatctgtttcttggacagccacatacccggattcaaccggtgataacttttaatttataactccaaattgagcgcataaatactcgttggaaaggtatgccaaagttctacatgattcccaaactgattcccattaattctccacgaaagatgcccagaaaccactaatactgctgctgttcgttcaccccctaaaattatggacaacccttctacccaatcgcatacgcaacatctaaacaattggattgcagcacaaatgaacaagagataaacacaaaaatcaccttgggttctccccctttccttcctcctttcctccctccaccgaaaaca

SEQ ID NO: 9299 - DNA, 1144 bp, Zea mays
ctgtttttgacacacaacttagtgcaccaatttcacataaccaggctcataaacgacaccgcacctacgcacaaactcaaaccccgccgcgggttacatctctccccacacccaccaaactgcagcggcgctgcttaataatttcataacttcaaaattatgacagcattggtaacaaacaaaaactccagaggcatctacataaaattccccacaagttttgtatacaatttataattaaattccaacatctaattagcccaaaacagttcacaagatgaaccctgtaatctattttttttctcttttggacagcgacatacccggattcaaatagcgatatcttttaaaatataattccaattcaagcgcataagtactcattggaaagataagacaaagccataaatgattatcatactggttagcactaattaaccacgaaaaattcccagaaattgctaatactactgctgttcacccacctgaaaaatctgttttttttatagcaacatacccggattcaaacagcgatatcttttaaaatataattccgaatcgagcacataagtactcattggaaaggtatgacaaagccctacatgattatcatattgattatcactaatttcccacgaaaaatccccagaatctgctaatactaatgctgttcgcccacctgcggaaatctgttttttggacagcgacatacccggattcaaacagcgatatctcctaaattataactccgaatcgagcgcataagtactcgttggaaaggtatgacaaagctctacaagattatcatagttattacagctaattaccgccgcaaaaaccccagaaactgcccacaatacttctgtccgcctgccacccaaaatcaggacagcactaccaccaattcgcttaggggaacggttaatcaaacgtaatcgcagaaaaaatacaaaataaacataagatcactttgagttattccttcacctctttgttcttcctccaccaattctccaattagaggcttgcaccactcgatggagatcccaaaggagaggggctgcaccttgggagggggattggggaagggggtggctagggtttgatggggagtgggcaggggtaccgagcaggattagtatag

SEQ ID NO: 9300 - DNA, 777 bp, Zea mays
ggctccttatctattatctaatgacagacatcctaaacaactcatagctgagttcctttcgcataggtatataaataagcacagcaagacaaattcatttttactatatttgattaaaaacttgctatatcatctaaatggccatatcttgttagttaatgttctgattatacaatatgctggttttacagtgttactaggagatgactactaactactagggcggtggctgtttggagaaattgctttcattcatatagccctattgtactagtggaggtttcttatctaaaatgttagctatgaggggtagcagtaagccagtaatccatctgtaccgacgtataaatttcccctgcttgtttcaagctgttctgaactaagagtttagaacgtaaggtctgtgatgttagacatgtttgtcccagtagattgattttgaaatgctatttgtccatttgtttctcttggttcattaataatgccacttttcactttgttgctattatctacttatcatagtgttctatatcttatgggctctaatttcattgatgctatttgtctggtttcttatctatactgcttgagttttgagtaaactgccggatggcccaaagtgaaaaccatttctgtaccccctattactaaatacttaaaaacataaatggtacctcttgacgtacatttgatcatgtatcaatacttcaatgttggaagaaattatttttaacttcattttctttgcttctatcatcttacatattatcagctcca

SEQ ID NO: 9301 - DNA, 781 bp, Zea mays
tggacgatggcgtgccaaccaatagttagcccatgatgtcagctacacatttctgatcagtgagaattcttcatcgtgtaccttgctatgtgtttcttaatttctgtctatgtacactggaatcacacccagagatctgctaggatgatgattagtgtgactttgatgctgacaagggggctggaggccctggttgacacaggcagtcaggaaaagggttctcataaaatgcctcttctgaccggaacctgtctttgccctttgttcctgagaccggaccttttcgtttccgtggagagccttgtctgaagagtgaagaatagaacaagaacaaaaataaggaactaacacagatcagtgtcttttagttgccatgcataccatcagtttagtaccttttctggtggatgtctattatcttttgtgatagcctctccccttcctctagtaatctactagccactttgtcaaacaagcgaactagtgctttcctggaccaaagaatgaacaaattgtgaaaacgatgagaagtgagctttagatgtataacaaaaaagtagaacaaactgtgaaaacgatgagaagtgagaaatgcagtggtttgtgattgtacctatcagggctgattgtcttcctatggccaaggaaacgcctgtgacctgcaacagcccgtgccatgttccccgaataagatggaatgaagacatcgctctccactgaaacaatataatctaaagctgccatttgagcagcatattggctgaaagaccgcagctcctca

SEQ ID NO: 9302 - DNA, 729 bp, Zea mays
tgcccgccgccgcatcgtcacgatcccaggcaccgatgtgaattgatggacacgtctgcctggctgcgattcgacctcgaacgcctagcagtgcaacagcagcggctctaaaccgtggcgctcccatgcccacatcacatccgacccacgggtggtacaagaacccattgttgccagtcgatttcgcaaccaaagcgataaaaacgataacgactgggcaaaagcttgtgttatcttgggacgtggctagtttcagagaaagggtgcgccgcgttgatctctgcttgatgggaaggggaatcagacgcaacaggcttgggtctcaactctcaactctcaatctctcatccaccatctcgcggtcgcagctccactgctattgtggcgtgaaaatggaatctactgctctgttgcccatgtttcaagagtgtggtcaaaaaagttttgcctgtcttgttatattacttgtacttgggtttttttttatagaataaccagctccttgttatttatcttttgagggaacaatatgttttttttttttgttagcaaggccgtggtttctttgaggccgttagttatttgggccgagtgtgtatgtatggaccaaccgagggacaatgcgggcggcttcacaccacggtttgtggctcacgaaagcagctcggctgcaaacggactcgaggagatgaaatccatcagaaaacaattgaagcccatcgtgtagca

SEQ ID NO: 9303 - DNA, 788 bp, Zea mays
tgacagcgacccgtagtggaatcatccgttgctccacggagaaatattaatattccacggacggccggccggccggcctgttttgacagcctctgaaaacggaatggcctgatttgatttgaagaagaatcaaatcaaagccttcttcatcttgggacgacttgtatttttgccagcccttttgaaagtgatttgagttggtatcgtattatcatcatgcctgcccagtatggcctcaaaaagaaaaaaagagagctgggaacagctccatcaataatgggcgttatacccaagtgagcaacttgcatcatgcgtgcgttggatcgttcgttttcttgtgccggttttagcttattagatgtgcagagaaacagacgattttgcgcgtacgtattccatgtcccaatcttcagatactccagtctgtgcaaatgagtaaatgacagtggggaaaaaattacagttctacgtactttgtcaatttacatgccagacgttgccacaattgattacccaaaccacagcatcagtaatatcaatcgaatatacaagtcgtctaaagaattcctctgatgaagaaagaaagaattgatgctggctcactcatccccattgggcagcttcatgtacctatgccccgccatgatctcctcctcttcctcggtgcgctccctgcattggaagtagtacgcggtgacggcggcgacggagaagacctcgacggcgccgagcagcagcacgtaggcgacgccggcggccaccccgcgcacggcgctccggggccacca

SEQ ID NO: 9304 - DNA, 792 bp, Zea mays
tgctgctactagtaccagtaccacagtgccacggtgatgcatgccggtagaaagaggcatacatgcatgacgaccggacctaccgtccttttgtgctgcgtgtcgtgtgagtcatgtaaaaaaaaaaagaagcaggtcagattggaaaaaaaaaagcatggtctaactcacgaggcgctttatcgggactgcacgattaggcgatgctcacgtgctgctgctctactggtttggtaaacgtaagatccggctcagcacatggccggcccggccacacgaggcaactgagctgaacgtacgtagccagtagcctcctggaaacgggattaccttttcaatttccagaatgttgcccaaaaaaatgttttacaacggatgcatgtacggtgctcgccataggtcagggtttggactttcgtatacgcatccaaatcgtgcgatgctagagcgtaacaaagcgataataatcttttaaagcatcggccttaccataggcgtacgtaccgcatacgtggctcttctctctatctctctcggtaacaatccaatcgtaaacaatattggtatttatgtttaaagtaatttgtattaaaaacgcatcgcatatttagtttattcatgtttgtttttgtaccagaaagtatagtatttcttttaaatagtattttgttaaagtttgatttgattgacttctggtgatgagaatttcaagcgtcataaactgataaacaaatggtacttggccgtgctctttacatgacctcatgacttgcctgcctgtctcaggggtac

SEQ ID NO: 9305 - DNA, 1317 bp, Zea mays
ccctgggatacatggaacacattgtggatggcagacatttgcggaggtaacttcaatttgtatgccatgggtccacatgcttctatgatctcataaggtccaatgtaacgaggggctaacttgcctttgatcccgaatctctgcactcccttggtgggtgataccttcagatatatgaaatctcccaccccgaactaaagaggtttccttctcttatcatggtaactcttctgcctggcctgagcagcttctagattctttgatgaggacatcacttctatacatacaatgaatggaccgataacacgatcgcgtgtacgacagctaattctccaggtacgttctaccctactcaattgtgtttcagagcttacgcttggggccatggatgttttgatgattaggaaccttggagacgaccagcaaagtcttgggaaggcctaggtgttgaggaggagcagcaagggcgcccacaacaggaaggagatcaagtccgactcggctgcgactccatctcgggttacaggaccagtctgcactgaaatagacgcccaagatacatccggactccgattgcaacgggcttgatatggttggaaagataaagagattatctaaccaacccaactggttccaccttaaaattcatccggagtcaacgggaatcgtcgaaacaattcagcgttcagattttgttttggtgctgcgacaccgtctgttgggccattgggccgtgtatcgcgtcggagcccattaggggcgagtccaggggtcacgcacgccctaatactctatttattcagcagccgccgccacattaggttttggggttttgcttagatcaattctgtcatcgaacagtgtcgccgtcatcagtttgtgagaccccatcccgtaatcaataaaattttggttgtgtttctttcctgttcttgcttgtgttcttgattgcgcttgcagggataagcctttgtggcgaggtcattcatgtatcacgggtgataaccaacggagccgtggtgtagtgattgcgaggaacctttcgctcggagccttggatcatcaacgtcgagatctccactcaatcaagttatcgtatctgacggaagatcgggtcgcatcttctatcaattggtatcagatttccaggttgcccgtgaggtataaccctacctttagattagttttgtttcgtcccatagtccacaaaaagcaaaaaaaataagtacgatcagtttattgcgacctaaaaccatcaccttagcctttgcacaattcagttatagagtccacagttctgagttcgtgttctaggtt

SEQ ID NO: 9306 - DNA, 819 bp, Zea mays
gtcgactctacaggatccccctgacacaccacctcctgcagcgtccggccgtctgggaggtagatgtactcatcgacatcgaacaagaaggtccaatttgcggcgtgccgatagcggtggaggcaatcgttcaccaccaagaactggttgtagtagtagccatcgtactccgcctgcgcccggatgtcctggacggtgacccgtccagcccggatccacggatccagcaccgccctgacctccgtgctgacaccaccggcgtcgtggagcacgaagtgcgacttggggccgaagaaatgcgcgtggtaagctagccactcccgcatgcgagccgcgctcagattcccgtagagcgaagaaccgcagtagaggtactcgtaggggaagggcggccggaaccgggactcgtcgtaggaacccggcacctcctcgagcgccacgaagcgctcgtaccggcgggaggcggtggagtagtatgcttggatgaagagcttcccgccgcggttgtcggcgttggggttggtggggaatgtgcagttaacgacgacgacggtgtagatgcggccgtagccccagtccggaagcatcttgtaggccttggtacggacggcccgcggcggcgccggcgacgatggctcctggttcggcacccactcgcacttgaagtagggggtgtcatagacgtgtgctggcttggaggccaacccaatgacggcgaacgtacgcgggccgccccggtacgcgcccatctgaacgaacagagccgccgcgctgccgtaggaacggaactcccgcttgttggggtcccgcggccgggca

SEQ ID NO: 9307 - DNA, 799 bp, Zea mays
tgcttactcgggcagctaatcatcttctacctctcgctcatcctccgagtgatctacgacacgccatcaacagtcggcgagatgcacggagctccatcaacgcctcgcgcgaacgataacatgagaacgagatccggtgccgggaagaatatgatcgggatcacggcattcctgcgcagagtcaggccaccagaactgagtcggcaacggcttcaactggtggcacagcccggggacggtcgaggcaccacgtcagcgactcccctccccgggacagacatcatcatcgacgacaggaggacacgtgtggggtatcggtgctcacttcacgtctaagggccattcaatggccccctaacttcaaagtctccaacgtcgacaagtacgagcctaagcaggatccgggaggctggctgatcgtctataccaccgccgctcgggccactggggcgactgaagacgtgatgactgcgtacttgcctatcatcctcgggcaagatgcactgcaatggctatgacacctaccctgacactgcatcgacgactggagcgacttcagtcggcgcttcaccgccaacttccaatctctctccgacaaaccggtgtagccatgggacctcaaatccatcaagcgccgaggggatgagactctccggtcatacctcaaaagatttcagaccatgaggaattgtatccccgaggttgcggaagcagcagtgatcgaggacttctaccggggatctaatgactcggccttcgtccgcgccatactgcagaaagcaccaactacctccgagca

SEQ ID NO: 9308 - DNA, 842 bp, Zea mays
gtcgactctatggatccccctggagatttcaacatgatttatcaagcctcagacaaaaataatgataatctggacagggccatgatgggaaggttttggagatttttaaatgaagttgatttgaaagaaatccctctcctgggccgtaaatatacttggtccaacgagaggagttcacctactttggtaaggctggatagggccttttgctgtttggaatgggagaatatatttcctgattcagttctccaaagttcggcgtctaatatatccgatcactgccctttgattcttggtttaaaactccaaactaaaggcaagaggagatttcactttgaaagcttttgggcaaaagtgccaggattccttgaggtcgttcaatggaactgggaagcttctgtacagtccacatgtgcagtagagcgcctttttctcaagttgcaacggctcagtaaagatttacataagtgggggcaaagaaaggttggtaacattaaattacaaattgagatggctaaggaaataatacatagactggagattgcaagagattccagggacctttcaaacagggaagaatggctaagaaagaagcttaaactacatctgcttggtcttgcttctttggaacgtaccattgctagactgcgttctagaatcctttatctcaaggaagaagatgcaaatacctccttttttcaccatcaagcctgtttcagaaagaaaaagaattttattgctaagctgcatacagaaatctcaaatctctatggctatctcacaagaagaaaagcaggcagcagtgctgaaatttgatggagagaccctggggcaaatggagc

SEQ ID NO: 9309 - DNA, 786 bp, Zea mays
tgtcaccagtggcgaattttctgagacccacggctggattcatttgtgtaagacactaagactagattatagaattctttgaactcaacactaaaattgaccgtgtctctattgctgttgctgcgcccatgaatagttccacgacgagacgagtttatgcatcgccattatctacggtttgagtacaaaagaaaccatagacacttcaatagacgtgcagaagtgcaagtcatgtactgaggcggtttacttgtaacggaagcgaatccgagggaagaaggtaccatgaaccataacctgaaacgtaattcagaaaataacggatgatgaatattgtcttctcccgaacatgtaggagaactgaattgtgcatcattatattaagaagaaaatgatgatgacttgtacaacccctaatgggataaaagaataaatgtggaaaggactagccaaacaaacagtaacgcaaaccagcgaccaaaaaagagagaccatcatggccatatgctatggagccccttggctcatgccagtgccccgcatgatggcatcaaggttaggcgaaaagcccttaaaaagacaaaatgacactcatttatatgtttccaaatccaccttgctgccaatacgaccaatgaggtgaaacccatgcgggcatatgtggtatagatcacgacattccaaacaagcatctcggtgtattgataacaccccgggtttccagccacagtgcttgctgctggcgtcgacttccctatagtggagatggccctggaattcaggtca

SEQ ID NO: 9310 - DNA, 865 bp, Zea mays
tggtatcggagcttgtaccaccacagaggaatcaataaaatgtaaataccatcattttccaaaataaaacttgatagaaacaatgttggatagatagtaggacgagcaggatagacctaggacgtgaagccttagggtaatagaggggtagctaggtggctaagtgattaggccctacaggccacttttacaggatgggagttcttcccaaatccttttacattaatgtgaggtcgttcaggatgaccatgcatgcattcttaaattaaagtaaatggaaaatttagtagggacttaaatacaagatgataaccaactaagtccacaatacctttttattttaactaaagaaaggctgagttttatttttcttgttcttttttataattctttttcttttacttacgcttaaccgtacacagatgacttcccacggatcctcagaggacggaaatgcactatcccccactgacgggcttgcacgagagggttttccccgcattttgtgggaagtacttcagggggctggatacacgacaccccctcagtacgcggtgcagcagttcgagaagcaccgagtgccccgctgtagggtgaggatgactttggagcctcatcccctacagccaggctggcgctctttggactccgagtcctttcggataccgagctgaggacacgatcgaggcgatcgctctgcatggattgaccactttctgcggattccatcccttggagctggctacccaccccattggcttgttccccgccgaaagggaggacgacccaatgtggaaggatcgggtggagcatgccaaggacatctgggctatctacccaggtcagactgcgcacttgaccgtac

SEQ ID NO: 9311 - DNA, 831 bp, Zea mays
ctgaggggttgggggcttccgaccattttgctgtggatttattgggaacttgcgcggctcccggggagaggatgtcttcgcccgagctccaggaatcttccgcgcgaatgcttaaggttaccaggggtcgctggcctaggagtgttccgatcccccgagcggccggcgaggacatctgtacgtctcgattagctcgtgagatgaagatttttccttacggacggaatgttgttgttgttgttgtatcatcagtgatggaaaaggatcaccaagacgcgtcgtggaaacgctgggtgtttgagagggtcggggaccatcgccgtgaggtcaagatggcacgggggatcgtgaagtctaccgtcctcggcaccagcaggcctccgttgcgcgcaaagtccgccgccccggccccagcaagacgctccctgacgtgcccgcacaggagcgaaggcctcccttcccgccgcgtactactgagacgaaggtgggtggggacgaggtctccatggatattttcgtggatgactatcttgtgggcggggtcgcgaagttcgatgcccatacaaggcggggacctatcggtgagcttttgttttgtttgttttttgtacggggtctgggtgtttgatgagactatggtgcagggtcggaggctgggcaactggctgttgtcccggcgccggtggcggctgggacgatcgccatggcgactggggcgaaggggtcttcgaaggacccatggtccaagttttgcgccagtggcgagatcgcttcggccaccgccgctaaggacgtggcaggctcatttgcgcagcaggcgaaccgtgctat

SEQ ID NO: 9312 - DNA, 762 bp, Zea mays
acgctcctgaggatccccctgtggcagaacctcccaagttattgggcccacatgcacctgtccttgtctcaaagacctcagactgctatgcatgtgcaccagataacttaacaggatccgtccgattgccccaaggacatcggataaaccacttataaccagaaccgcgggattaagtaacacaaatcacacacacaacatttttgcagcggaaatcttattatcaaattttacaggttataaaaaaatttacattattttatcggagtgattacaaaagtataagtttgaaatatatgctagctcaagtgaccatcctcaataagaagtatagaagaagtacttagacttataagaaggccgagcccaccggcacttaacaccatcaacagcagcacaaaattaaaacctgaaaaacaacagggaataaaaccctgagtatggaattactcagcaagacttacccgactaaagaaaagactctcaagggtatgctggataaataggaatcaaggagaggctttagcaagaatcaacttagatacttttgcagaaatagcttactaaagtgagtccttactttcaatattttaacgccagattaagtattaatagactctgtttgcctttagtctaatttcatcatctcatcaatacaacattattttcattcataatgttcacatcctgacttaggttgtagacaagtgaccacgtcttcataaccgcgaaggtacggcgatccgaatcgattatactcaa

SEQ ID NO: 9313 - DNA, 800 bp, Zea mays
ttgagtaaatcgattcggatcgccgttatatccccggagagtggagacttgagctccgacctacaacctaagtcaagatgtgaacactatggataaaaatgatgttgtattgatgagatgatgaaattagactagatgcaaacagagtctattaaatatttaatctggcgttaaaatattgaaagtaaggactcactttagtaagctatttctgcaaaagtatctaagttgattcttgctaaagcctctccttgattcccaaatccagcatacccttgagagtcttttctttagtcgggtaagtcttgctgagtaattccatactcagggttttattccctgttgtttttcaggttatagtttttgtgctgttgttgatggtgttaagtgccggtgggctcggccttcttatataagtataccccatctttatcttcttattgaggatggtcacttgagctagcatatatttcaaacttataaacaatttataacaattcaaagttactttctttgaatcacttttgtaatcactctgatcatgtacgaagtaaaattttgtaacttgtaaaatttggtaataagatttccgctgtaatattgttggtgtgtgtgatttgtgttacttaatcccgcggttctggttgtaagtggtttatccgaggtccttggggcactcggacggatcctgttaagttatttggtgcacatgcatagccgtatgaggtctttgagacaaggacaggtgcatgtgggcccaataacttgggaggtctgccacaaaggtaccgagctcgatt

SEQ ID NO: 9314 - DNA, 824 bp, Zea mays
attcgagctcggtaccctctggagatggaaaagaaggcttccattggatgatgatgtacttgtttagtagatgcttcaaatctaaaatttatgaatataatattctctttgtcatttagatgcatttaaactctaatttgttgttgttctagacattgatatggttcgattatgtaatatggagttttagaccaatttacttggctgttggctgcttggtcatatggtttaatccttctttacttggcggcttggtcatacggtttaattacctgattttgcatcattgcttggttgctgcgctgccacttcttactcatttaatccttgtttcagatacaagagctgcaactcagcaagattggagtgggacagccaaaatacaatgaagctgtcacttcacatctaacacactatgttcgtcttcgctgatgcatgcactacaagttgtaagtcaagaacttagtatcttccatgcatatgggttatcgttacttttgtcagtatctcagaccgtgtccagcagctttttcatatgattatccaaaacactgttttacattgttttgcactgtagactgcactattcgctgagtagagtttgaatatgaagatgaggatggataagctgttggagatagtctcagcaaattctaacagatcgcagtgtactgcatgtcggcttgtgtaactcgtaggaccactaccatatcaagaaataaatatttaatactggtaaggtaacggcaagacaaatttgccaagcttattaagggggaaattgacaaacacttttagcacatgttcggctgtggtaaaaggca

SEQ ID NO: 9315 - DNA, 793 bp, Zea mays
tgctgaggagatttgatctacaagtgcttgcccctcagcctggcttgtcttccttcatgagctcgtgggaagaagcctcaggttcagtcactggacctattagaaaggggctcaattctcgcattgccttgggggcctggattatttggaagcatcacaacaaatgtgtctttgataattggacccctaataattttagctattttttttctcgaaagcgcaagagaactgcacatctttgtatattaagaagaaaaggttgaaagggccttagaaatgcccagatacaaaagaaccccattacgggggccagtaacaagcatacaagaaataatccataaggaaaaaatcacccctagaaggtcgctctcacagcagccatcaagaatctggcagcggggcaacaaggtgagatatccccttggccccagcaatttcccactttctcccttcatcattagcaagcctaaggagcagagttaggctgggtgtcaagtggtaaaaaacacatctattacggtgattccagagcatccaggcacccaagataattaggataaatccactccttgatgagcccatttactgcatccgaagcatcttcccaccaatccagaaagtgaataatccctggctgaggagctagggaatgtattccatactttctcagcagcttgtaccagaagagacgtgcaaaacacatgacaccagcagatgatttattgtttcagcttcctggtcacaaaaaggacatctgtttgggtggttcaggcctctcttggctaacctgtca

SEQ ID NO: 9316 - DNA, 764 bp, Zea mays
tgcggccgttcgttgagctgtactcctcgctcgggtggcgctgcctcgtctgccaccccgacctcgtcgcgctgtgagtgccgccttgccgttactcgttttgacttatggaggcgcgcggatgtagctctttagcttctacttgtatcctgacctgcctctgcggatatgcctatgcctgggtttaatttcagagattgcttactagtttgtgcctgcagaaatcgcgagacgggaagatttaggtttggccacttattttatttttgcggcaagcagattggttcggcatggtacttagctgagttgtgttaaagtttggcaactccctttagattaatcactgggtgttaatatccctagtcttaaggttgatatatttgtgcagtttttactgtttgctctgtattgatgtcattttagcaatcccttctgtttggcttttagtcatggtcgtcttagttaagttactgattgcatgatgacaaagatgttttgattgtggtaattaggattaaatcattgcacttcaaggtttgactaattttcaaatactttacaaagcatagaccatagagaatgtgttgtaatgttataactcctgttgatcttcagccataagttcctatcattgatccaacatgtccttatccctttttcacttcttttgcttttatgtgttgacagaggctaaaatcatatatgcatgggttcaatatgtagctgggtctatccaaacatttttggtgcttgaataacgtgca

SEQ ID NO: 9317 - DNA, 836 bp, Zea mays
tgattctttcctcccggctcccgctagagacggacggttcgtttttcctttgcatgcaccgccctccggccttccacttcccacgcaaaccgccgccgccacttcctcgggctcggcggcgccggcgcccatggcgaccccgtcccacggcatccccctccgcgcgctcctcctcctcgcgctgtctcttctctccatccccatcgtgttccagctcctccaccgcccgactcccagtcccatgccccctccgctcctccgaataacctgcgccgacgcggcgtcgcagtcgccccgcgcgaaccctcctccactcgcctccgacgtacacgtaccaccaccggcgcctaagccggaggaggcgtcggagccgacgtccctgcgccacgtggtattcgggatcgcctcctcccggcgcacgctgccgctccgtctccctctgctccggctctggctgcgcgcccccgcgcgcgccttcctcttcctggacgcgccggcgccggacgcccgcgacctcccaccgggcctcgccctccgcgtctccgccgacgcgtcgcgcttcccctacacccaccggcgcggcctcccctcggccgtccgcgtcgcgcgcatcgccggggagctcgtctccgcgctgaatcagcaggaggaggaggatgtgcggtggctcgtgctcgccgacgacgacaccgctttcgtcctcccgaacctgctccacacgctgcgcaggtacgaccacggcgagccctggtacctcggcgcgcgctccgagtccgcggcgcagaacgcgttgcacggcttcgccatggcgtacggcggcgccggcatcgcggtca

SEQ ID NO: 9318 - DNA, 768 bp, Zea mays
cccctgcttgagatgtgcgctaatctgaatctttctgcgacctcaagacaaaatagatttccattccagaacactagaactggtgttcaaggcgcaaataatgtctgtccattttcaagatgtgtgtcagtgtgtatcctgtatccatgaaagtagactgaatcaatcaatcacagattcaaacagtcttcttttccttagtagtaccccaaaaaaaaagatgtctagattcagaggctttagaatttttgtcattattatttttgggtaaatcagatccatatatgtacatgcacgatcaccgatgccactctcactcactcactcactcactcacaggttacaaaataaagggaagacagacaaagacgacgaagctaccaaacagcaaagctctctctatgcagttgcagactatgttacacagacgcttgagccctgactgacacggcggagagagagctcacttgccgcctgcgatggcggcgccgtaggaccggctcctcctgacctcctccggcggtatgaaggcgtccgggccgagccccggcacgttgaacgccacgtcgtcgatggtccacgactcctccatccgcgtgacgacgcgcgcggcgcggacgcccacgccgaaccgggcgaggtgcgccgtggacgtgcccgcgtgcgcgacggccacgccgccgtccacggcgcggtagtccgacaccgccgacgcgatggtggtctcccagtacatggcggccgcgccgggggactggatccgggtca

SEQ ID NO: 9319 - DNA, 802 bp, Zea mays
attcgagctcggtaccctgcattgcatgaatacgacttcacttatatccgtccttcgagataggccgaccgttgacatataaaaacccggaatggtgcaaggaagacgatgccgtgagctgcttgtaagaacactgattccggggtggaggtatgccgctcccggcatacgatttcctctcacgaagcactgaagtcagagtaattgtgtggaacttacaacggcagagccgacagaagatccggacgcagccgaccaacaggattctattctccacacctcacaggttcctctctatcccttcttaaccccttctcacgagttcagcaaaaataaaataacactgctggagactcctagtgggtccattctagcccattcactcttgggttgggcttcaccccacgacgaggcatgttatcttcatcagatccttttatattcttgacacccagctagcacattgagcagagttgtttcgttagacccagatggtcccatagtgctacttctccctggtttccctgacaaagtgacaactcacaattaaacaacatgccataaacatctattagtcgactccagttattctatatcctgattacccgtactggtacagaactacagagtacagattatgcaacgtgtcgtagaataccgtgggtcaacgaaagagtgcatacacatggcaaacgggacgaagagggtttcgtgcgcgcggctgcggcgagttgggaagaggtgatgccgtggcggcggtgtagcgactcaccgcttccccgcgcttgttctccagcgcgca

SEQ ID NO: 9320 - DNA, 1365 bp, Zea mays
agctcggtaccctgtttttttggaggactgatagattctctctacttgacttagtctcttttacaaacaatgttgatgtcgaggacccacagagaggaaagccagttggcagctaagattgaatacgagtgcaaaatgagaggtgcccaaagaatggcgtaagctttctgccgtgtatccttgttatccatttagttgttaattgacaatttagttatgttcttaagaatagatgtgggtccaggaagtttttttttattcgaggagctaggcgctactatcagacaatttatttaccttgtgcttggttgccatatcttaggttccatcccgtagttggtggaggagcaaatggcagcattatacattattcaagaaacgatagaaaagtaagttctttgtctcttgttgtctaattccacatctcagagctattttcttgtaaaggctataatgcagttgtttgacagatcaggacaggtgatcttctgctcatggatgttggctgcgagtatcatggctaccttagcgatctgactcgaacatggccaccctgtggcaggttttcacgtcgcaatcgcatcgttttggctaggctccggttagcaactttgtagcaatacaagagaggggacgaagtggtgaacaaccgacgttattgtatttgatactcctctccgaacaagtagctaagcaaaggcagattcagatagccgtgctgctgcacaaatgtgctgcaataatgcagatgaggatgattttttttatatatatacaaaaaagacccaaaatccaacccggaaccaaaccgccgccgccgttgaatggtcgggtagagaacgcaaccatggttaagtccaggccctttaaaagccgagccgggggctcgtcccatccgccccacaccgcttcactcgtttccttccgatccatacacaccgcgcacgtacgcgtactccatcgtcccgtacgtgcccgtcctctcctccccgtgtgtcgtgtgtgcctgagctccaagagatcgagagcatcaatggcaggctttggtccccaaggctgcttgctaatgcgcgctcgctgccgtgtttctctgtgtgcagggtgcaggcgggttcacgtcacgagctcgatcggccgagacgagatggcgacgccgaacgggcttgctcggatcgagacgaacggggcgacgaagcccgacaacggcgtgtgccacgacgacagctcggcgccggtgcgcgcgcagaccatcgacgagctgcactcgctgcagcggaagcggtcggcgccaaccacgcccatcaaggacggcgccgcctcgaccttcgccgccgcgctctccgaggaggagcgccacaggcagca

SEQ ID NO: 9321 - DNA, 766 bp, Zea mays
tgacttgtcttcattcgccgtttgtcccgagcactccctcgtatagcagcagtacactttgcaggtcttatattctcttcatccacttttaggagaagtaaagaatcaccttctgcaaataataagcgaggaattctacggcgcccttttctacaaaagatgctatgcatgccaacgaactgcatgggaagatggcgatgattggcgcccgactggtccggcggccgcagccgcaccatgtgtccatgtccatgtccatatccattctaaagtgcgcacgatggcaagaagccaagaacgctggtgttgaaacggaacttggaagcaccctggaaagcgctgctatagtagtagtaagcacaagcagatattcgtatacgtggctagggcgaatcgcacatgaaaagcaaggcaaagtgcatagaaaggctagaggatctccgagagcgatttctcctgtcatcagtgcgtgaaactggcaggagaaagcgccgtcgaaaggaggcagagagaaacccagagcgaaacaccctggaagtgggttggctggctggctggaatggattgctggcggattggatcggaaaacgagacgacgccggggacgaggcccatgtgcggtgcgccggaggcccacaagccaccaggacacacacgacgaggtggtctggtcgacgcgaaagtacaagttgtacaacgcgttgtccaatcaactcacggtacgattgcacggtagctacaagcaaaagggtgtgccgtgctacca

SEQ ID NO: 9322 - DNA, 766 bp, Zea mays
tgcaactcccttgcgatctggccgaattgcgaaacctgatgaggctggagatgtttttcctctcacacaaggtcacacttttggccacttgccgtttaggcacgcaagccatacacgatatccaagcagagggagaaatggaccgaggacgagcacaggctcttcttggaagccctgcagcagcatggccgtgcctggcgccatatacaaggtgagagttgtgccacacacctactttatttatgctctttgtctcttgtacaagctttactattattaccagaactgcacggaacctggctgataaccggtacaatctgcagagcacgtaggcagcaagactgccgtgcagatcaggagccacgctcagaagttcttctccaaggtctcgttgcctctttgcatagattaaaaaaaaacacacacacacaccatcatatccccactctgcctggaaaaaaaaatccatggattgtgttgcttgcaaaggtgatgtaagtcagctcaaccatggacagcaggtgctatccatgctgtgtcactgaagacgtacgggcttctgatcgctcttgtttcgcacgctgcaggtcatccgagaatcctctggaggggatagcaacggcaacggcaacagcgtagcggctccaccacaaattcagattccgccgccgcggcccaagaggaggccaacgcacccgtacccgcgcaagctgggtagttcggtcggcaaggacgcctccgcgatcaagcggcttcaggagcccca

SEQ ID NO: 9323 - DNA, 1282 bp, Zea mays
tgaggataaggtcattggggctgttctgacacaagaaactgagaggaaggagcatgtggtgacatatctaagccgaaggttggtggatgctgaaacagggtacacttttattgaaaagttatgcttatgcttgttttatgcatgcaccaaatttagatgttatttactgtctagtcattgcactgtttctggtcaagccgatgtgatcaaatacatgttgcataacccaattatgagtggtagaattggtaagtgggcttatgcactaatagaatatgacttggcctatgaaccattgaaatttatgaaaggccaagtcgtagcggatttcattgtagaacatcgggttaatgatattcatgagctagacatgttatacctcactattattccttggactttatattttgatggatcggtttgcaatgaagggcaaggaattgacattgtacttgtttcaccaagtaatgtctcctttgacttctctagccgattgaaaacttattgcactaataatcaagctgaatatgaggccctcctattcggcttagaacttttaaatggtatgggagtaaaacatgtgaaggtatttggtgattctcagctggtcgtccaacaagtgttagaagaatatcaatgttttgatggtactctaaatagttaccttgagaaatgttggagcataatccattcttttgacgaattcagtattcggcatatctctagagttgagaatcatagagctaacgatttggcacaagatgcatcaggttatcggataaagagagggaaatttcacaaaactgaaattctgataaccggtgcagagccaaattcccaggtcgcggaccgtccgcgtgatgacgccggaccgtccggggttaccagaaatgttctcttaattgattcggctgacaatgaagccgatgcaagtgattggaggacacctatacttaattatttacgaaatcccaatatcaggacagataagaacattcggcgaacagctttcaagtatgttttgatgagtgatgaactttaccgccgaacagtcaacgacgtcctgcttaagtgcttgggcccatatgatgctatattagccatggccgaagtacatgaaggaatttgtggtactcatcaatcggctccaaagatgaaatggctgttgcaaagatctggtttttattggcctaacatgatagctgattgtttcaagtactacaagggttgccaggtgtgtcaaaaattcggcgacctacagttggtccctgcagggtaccga

SEQ ID NO: 9324 - DNA, 797 bp, Zea mays
tgttccatttcagcctggcacccccacaactacgaaaaggcgcacgcatcttcgtctcacaagcaccggtaaataaatctgaaaaggagtacaaacattcaaatggtttggctctttcagaaacaaaaatgaaagaaaaaaaatccagatgccagaaccgcatttcctaatctattccagagttttcctaacactgctttgcttttgctgatctgttcgtttgcagacgcaatgatccatccgatggggccgtcgtaatcttgtttcgccaagggttcttcctttaaagctttcgtgttggcaaaaggccaagcatttccatggagcagacgagacggctgttccaaacctaactagctttgtttcgaagccaacggagcggcgaggtagatgcagagggctctgctttttgcttaagcacctacagtaagctggagacctgtctgtactggagtgttcttctacgtacactgtatctatggagcgagtacagagggtaggtgcaagcactggatcaccattgactatacggcaaataggagtggcctcctgatttgtacagaggacagaggagtatggtcaagctgcgtacttgggagcggaaccaaatctgccaccaagccagtgccacccttgcaccgtttactcaaacaacgtgccttgccgtgctgtggccctgccctgccctacccggctaccctacatctcccaacaatggacacagtgagtcagtgagcactagcatagcagcggcagagccgttgagtctttgagatggagaagaatgcaacagagga

SEQ ID NO: 9325 - DNA, 625 bp, Zea mays
tgcgctcgcccccgccggcgccgtccgctccgccagggtagcctccctgcaccctttccactcttccagtacgtgccactgcaactctcttatctttctcgccatcttgcgctggttaatttggtcggaatccaatccttttctttttactgcttcgtgctccccccctaagccaaaatcgtgctgctgccaccacggaccgccctgctcagatccgccaggcagaggcggcgcttggcggcacggagcagcacctcggagagcagcacggatgactcccaatccctgaaacaagacaaggtaatccacgcccccacgggccacaccaccacacacaaagcacgcccaaaaactaaccgatcgagcggggtactacggtcgcgtgcaggcgccgttcgggtacacgaggaaagacgtgctgctgatcggcctcggcgtcaccgccttcggcgtcggcctcaagtacgggctcgaggtgaggagccggtgtcggtgccgccgccgtgtctgtccatgttcactgcaaaagtttcgctcgtttttcatctgcttctgatttactcgccgggaaacgctacgcgcagctcctgggagttgaccccttgcaggccggcaacgtcgtgca

SEQ ID NO: 9326 - DNA, 840 bp, Zea mays
tgcttagccattgcagtaatgccgtgcctgcaggagaagtggattctgaggttttaggacttctctcagtggcaggattttaacaatctgcccgagctgatgagctttttagtttagtgttagagcgtgacggcgggtggactggactggaccatcactcccgcaaccaacgtgccacgagactagacggctgcaggcgccacatgcagacgcagttgcccaggtttggtcagggatgggggacgtacgctgacagatcgatcgaggaccagtggcgccctgcttgactgcttcactccggccacctgcattgttgccggagctgcactacaggctgctgtctgagcggggcgaccacgcctttcctttcctttcctttccttcatccgccgcaataatgccttgccctgcacggcggcacctcactcgctggcacagcccacacatgccgcaccgcagcaatggaaacgccaggccagagcaatcgcagccagcagcgagaaggggcctggcggggctcgagctcgatcgatgcgcccactcacgtgcggatcgccagacggctcgtgcacgcgccagttcagttcttgtacgcgagcgaacgtggcgtttgtgtgcgctagcttcgccatggccagttcagttgttgctcggctgctagtacagtacgtagaactgtcgctagggtagggcagccggagcgggctacgcggctgaccaaagtgtcagtggctctactaccggtacttgcgcccatgagtccatgactcgcgatgctctgatgagtcaggcagcaggctggcacggtaccgggggcaggcaggggtaccgagctcgaat

SEQ ID NO: 9327 - DNA, 1052 bp, Zea mays
  unsure (1)..(1052): unsure at all n locations
tgctagaagctaattttattagaccttgcagatacgcagagtgggtctccaatattgtgccggtggagaaggagtcaggtaagcttagagtatgcattgattttcgcaatttaaatagagcaactcctaaagatgagtatcccatgcccatagccgacacattaatcaataatgcatcaggaaatagaattattagctttcttgatggtaatgccggatataatcagattttcatggccgaagaagatgcgtctaaaacggcctttatatgtccaggcttcattggtttatttgagtgggttgtcatgacatttggtctgaaaaatgctggtgctacttatcagagggctatgaatttgatcttccatgaattgttaggaaacactgtggaagtctacattgatgatattgtagtcaaatcggctgagtttagttctcatatagctgatttgcgcaaagcctttgataaaatgcgtcggtatggtttgaaaatgaacccacgtaaatgtgcttttggagtgtcggctggtaagtttttaggatttgtcatacatgaacatggtatagagatagaccctgaccgaatcaagtctattcggaatgtgggacctccgacctgtaaggtcgaggtacagaggtttctcggcaaggtgaattatttacgaaggtttatttctaacctagccgggaagattgatgtgttcacccctatccttcggcttaagaatgatgccgaattcgcttggggggcagaaannnnggtgatatgaatcccgtcgtggggccgcagtgccgggttgcccgaggccacagcgggccgtgctggcaatgatcggtgcctagtcacggcgattaggggaccggcaagcacaatattccgaacaagcctacgagatggttgcgaggtggagtcacccaaacacgcctagaaaagtcaaccgcacgttgatatatcgccccaatcgcttatagtcagtagataggagaagtagtaagtctgccgcgcgagaatatgcggcccatctctggtgtccgctttgatacttcagcgc

SEQ ID NO: 9328 - DNA, 744 bp, Zea mays
attcgagctcggtacccctgcaatgtataatcggaatggtactcctgcttgtggtgcttttaatacgggagccgaagacaagtattttttaatgagatcaaatgcttcctgctgctctgccccccaagcgaattcggcatcattcttaagccgaaggataggggtgaaggcatcaatcttcccggctaggttagaaataaaccttcgtaaataattcaccttgctgagaaacttctgtacttcgaccttacaggtcggaggtcccacattctgaatagacttgattcggtcagggtctatctctatgccatgttcatggatgacaaatcctaaaaacttaccagccgacactccaaaagcacatttacgtgggttcattttcaaaccataccgacacattttatcaaaggctttgcgcaaatcagctaaatgagaactaaactcagccgattttactacaatatcatcaatgtagacttccatagtgtttcctaacaactcatggaagatcaaattcatagccctctgataagtagcaccagcattttttagaccaaatgtcatgacaacccactcaaataaaccaatgaagcctggacatataaatgctgttttagacgcatcctcttcggccatgaaaatctaattatatccggcattaccatcaagaaaactaataattctatttcctgatgcatcattgattaatgtgtcggctatgggcatgggatactcatcttcagg

SEQ ID NO: 9329 - DNA, 833 bp, Zea mays
tacaactctgctcggtacccctggctgtacagaaaacatgatcgagtttaacaagtgtagggacatttctctcatttgaccaagtgaatttcctgcctaccaacgggatttcttttagctccaggtcatggataagtctcctgaatctgcccagcattgccctgtttatattggtattgttcttgtcttctgagctgtggatctgattaaaatctccagctattacccaagggccaacgcatgtctccctgacctccctaagctcctggaggaacgaaagcttgagagggtcgtggtgtggcccataaacaccagtgaaccaccactgggcaccaccttcctcttgcaacttgactgaaactgtgaaatcatgcaccaaactctcaatgacagaatagactccatctctacaagccaccaaaacaccacctctggttccttgcgctggggagtaaaaaaaatcactaaaaccagcaccaagaatagacaggatgtcaaaggctgagatagagcctagcttagtttcctgcaaacagacaaccgctggtttgatgctcataaccaaggacttaacaatgtctctcctagacctgtcatttaggccccttacattccagataagaaaaacaggctgcattataacagggtacacaaaagaagcacgacctacaccccctccaatcagttttgagcccggtcttccccaggcaattcccagccaaataatgctgccatggcagcaacatgctctctggaaagtgctgcatcaaaaaggtgaacatacttttgggcgtcttcgaaggaaatatgttcctgatcatcacaaaatccca

SEQ ID NO: 9330 - DNA, 1181 bp, Zea mays
gcaaagggaagtaggagtatgttccaaagcggaaaaaaaattttagatccagggagaccaggaattgcccatgatttatcaaattggaaggtggggaaagcaccaccggcccgggtgtagccccttgggccttcgaaggagtgggtttcactcctctaaggtctaaatgcctttcgtggtgcctcggccggtctgatggttccctcatccggcctgccagtagcccgggtgcatggtcaggttccaagttatcacgctggttggttgacgctgtcaatagtttggccgtaactgtgtgccagagcagcccttgaagcctctgcacggagcgagagaacgatcaaggactttctcgacttttatcatacgcccctgcgtcacctttctgcaaggaggggggaaagcaccatgttgccctcggagggcgccgaacatggtgtttccagtgagctgctaacgggtgatccgagtggacgcccgtgccccgttcgttaggggtcggctggtggcccagaggcgcgctccaaaagtacctgcgggtggttcgtcgacccggaccctttcgacagggtccgagggctcgatgcctccctccggtgggattccgttacaaatcattcccaccggtctcggaaatgtcctagagtacctcgggagcgtagcccaagcctcggccatgtatcggacatacccagagtcatccctcactctgcgtgctctggggcgactatcgaacccttccgaggggccagccttcgaacccctgatcagtaatgggcgcggagcccgagtgctctgaggcggctgtcgaacccttccgaggggccagccttcgaacccctgatcagtaggggggctcggggcccgcttccttcgcggagaaggatccctttcggagtatcccctttcccggtccctgtagcaagagagagaaaggggaagaggaaaaggatacgaaatcgaacgacgtggcgcaccttttttgacgcggtcatcatggcggaggtggaagcgtcgcccgcttcgcctgccaaaggtgtcgcctgccctgccgcggagttaatgcgacgggacgagtggttcgtggggcagtcgttgtgcgtgcgtgagtcattcgaggaacgggcgtttcccttcgagttcgaatttcgcgggtggttcgggcgaactgtgaacgggtc

SEQ ID NO: 9331 - DNA, 774 bp, Zea mays
tgcaaatgaagctcaagctgcgacctctatgcggccgactgaagaaaccaagcggatcaaccttgggtttgctgatgagcgcaagacggccatcatcagctccagcctggatgacaaataggaaagcgcgctcgtccagttcctgcaagataaccgagacgtattcgcatggcaacctgcggatatgccgggagtcccgagagaactggccgagcacaaactgaaggtctatccccaggcgaggccgattcggcaaaagctgcgtcgtttcacgcccgacaagagagaggccattcgcgctgagctggcccgcttggtcgcggctggatttattagagaagtattacatcccgagtggttagccaaccctgttcttgtactcaaaaagaataaagtggattggcgcatgtgcgtcgactatacggatctcaacaaacactgtccaaaggatcccttcgggcttcctaggatagatcaggtggtagattccaccgctggatgttctgtgctacctttcttagattgctactccgggtatcatcagattagcttggcaaaagaagacgaggaaaaaacagcgttcatcaccccgtttggcgctttctgttatacctccatgccgttcggcctcaaaaacgctggagcgacttatcagagagccattcaaacatgcttagccgaccactggggcaagcatgtggaagcctatgtagacgacgtggtgatcaagacagaaaattcagaaaattccattaaggatttacaggggaatct

SEQ ID NO: 9332 - DNA, 742 bp, Zea mays
tgcatataaaattttaaatttatgggccatttcattagaaaaatggtacatgcaaaaaaaaaaaattaagattattacctttcgcaagagcttcttcccttctttttatttcctagagaaaaggagcacaaagttaaacagaatgatgatgagaataaatgctaattaaagttccaaactgtgtaaagttacttgcatgcatgcttgataaaacaataacggtaactggctagtatatacctgttccctcctatttagctcagcctctttagccataagttctctctcctttttcttgaggccatcctgcattgtgtagacgaactcatcacaaaaggatctgatactgatattgaaagaaagaaagaaagcaacatagagaaaaaatgctaagggaaaaggaaaataaactagtctctaattcctcctcttgtgtcttttttatctcagaaggatgctgatactgatattgaaagaatcaaccatagcaggttcagtcgaaataaaggtagccaacttatttgttagcttacagtagagaaacatagaaccaaacatcaggtggacatacatatgtaagtttgaagctttgcataatgattgaaagatagtacaaaatcaaagaaaaaggctaaaattagtagtaaatgatagttaaccaagcaattcaagcagtcaaactaccttttttgtatcaagtgggatatctacagacgatgcaccaatgtcattgtagaaacca

SEQ ID NO: 9333 - DNA, 831 bp, Zea mays
cggacgactctagaggatccccctgatggtatccaggcaacaaaaagagtctgttatttcttgttttttatcgctatgtaatgttgtcttgtattcagccagtggcacaagatggataaaaaatgtgtaaaaaatcggagaaaattggagaaacatctcacgcccttaatggggcagagggtgtgacctttcatatatagaaccgagtaggcttaggttacaaaaatacgacaagacctattcaaatacaatggcgcgactatatgcatttctaataaaataagcttccagatacttgattaatgctaattgtatcagaatcatgtgagctttctgatgttgtcaatgtgaaaacccttcagcttggacagtatcttcctttcctaactgattttttagagaacaaaattcttggtccagcttttattgaaagccgatgaaacggttctttctttcctaactgattgatattggtaacttgttttctgagctttaatcctcggatatctcaggtgcgctcttactaaagaaggatgttgtcaagttggactccattgctcagaaagtcaatacccattgtctaagctcaggttgttggaaaatcattaggaattattgcatgaaaatactctaagagcggacttcattagccttcctgaggatagtggtcactgaccaaatcttccatgtttatgcaaggaaacataacatttactgactatgagtgttcaaaatttgttcacttgcttttgaagatagcttctggttccaagagacaggtgttgttgtaggagatctgctaacattttgatcaaatccaggggtaccgag

SEQ ID NO: 9334 - DNA, 827 bp, Zea mays
tgtaactgcctttcacatctttgactcccacgagagcacgcaaaaggtaactgaaacgccgaaacaagtctcaggaaagcggggtgtgtttttcttctgtataaatgaaagagagacgtctttccggactcgtcgcccaaaagattgctcgccctgcctgcctggctggcaacatcagaaatcagagaataggcgagtagcaagcagcattcagaacagctacctgactgagctgctgctagggagtagtactagtacagtactccacgtccacgcacgggtaattgacttcgacttgtagtaggagtacttctgtacaaaaaaacttgcatggcttggattagttcacgggaggaccgcggatcaacagcaccagactcgcgactcgagtgctttggcacggcgcggcagtgcaattagtgggaagtctagcagcagagccctaaccgaaagacactagacaccatcaacgaaagaagatgtacccagtcgaaacaggacacgtcgatcgaactagaccctagaacaacaaaacggccgccccccgccgtttgcatgcatcagcatgcagttgcaaacgcgccagccagccagccaggtgatggaggtgagtaagcagactagctggtgctagcggggggcgaggcggcggagggcaccgcgacgttcaggcttaggtcggcgccatccagcgccagccgcggcttcctcgcaggccaggtgggcggctggtcttcttcctgcggggaagccggcctctttttgcccgtgcccgcgcagctaggagcgggggcggcgctcagtgggatccctctagggtcgactgc

SEQ ID NO: 9335 - DNA, 855 bp, Zea mays
aggccgactctagaggatccccctggtggaagtggtggctcgggagactgcagaggcatggtggggccagagatagtaggagtcggtgatggaagcaaagactgtaggtggcggaggcgtgggagccgcactgggaatgcgctccagtgctgttgccgagacatggtgcccagcaccatttgccaaacaggacttcagcagcatactcttcagatcaagcaacatatcattttcaggacaaggacagttcatccagaaaatcaagtatgcatgtatattttggaggtcttgtcatggtaagaagctttcctacaaaactgtactgatagcactatataggatatgctatcatatgttcaaataaataaatggacaatagaaaatcaccaataatcaccacaggagcatattccttcctcaaaatgatgaaagcgattgatatctctaacaatgatttcccgttgaactattttagatataactttaaacatggtatggcagtccaagcaggaacgcaaattcttcattatccgtattggatggccaggaggtgtcatagaaaggccatatgctaaagccagcctctcactatgcacccatagcatgcgagctttttcttcctcatccacgtcatgcaacactacgtttatgtctggaacataaccttctctactagccttcaggtttaaccattccagcattgcatttattatccgcatatctggatggtctgctgatcccactgaaaaggcatgaacttcccccttgatctcaacccaactaaggccagcctctttctttacaccgacgtttctcattgatttcctccaaagagcaacttcatccaaaattcca

SEQ ID NO: 9336 - DNA, 808 bp, Zea mays
tgcaagcacaacacattattaaaatcatcccttggtactaatctggacttctgaagtaatggtagagagcaattacctagtctaaactcaaaaggtcttccactgacgttggagtcgaaaatagtgccattctttagcttgccaatatatctaacagaaacctattaagaaaaaaaaatagcatcgtaacagacagcaggtagaaggacctcaagtagtaaaattgatcatagccatgcaaaaaatgcatgcaggtcatggataaagcatgtaaatgttagaattgcaggaggcagtgagaaattgcaataataaatggatagctaggagatgatcatccctttgaagctcctcagatgccagaaatgtttaccttcttcccacggctggcctttttaccatcaggtttgcccatctctacctcctgaatcatcataccattggcaaacgttcgtgtttggagtggttccttgctatctgactcaccaagtccagttcctgcctgactttcacttctgcttatatcatgtgccttctttttcttgatctttttattggcctcctgcgcacttgcctcctcattgtctttatcactgaaattaggtgaagaacattgttaaacgatattgagccatgtgattaacattcctatgtgaaaagcatctgcaaagcaacatctcaagatactaacatattgttgttcttagcagattgctcactggtatcacccccagaagcacttatgttcttgtttttctttttcttctgttttgcactggcaggatcagaggtaccgagctgtaattcg

SEQ ID NO: 9337 - DNA, 847 bp, Zea mays
tgagcggcatcgcggccatcatcaagagcctgcacccgagctggtcccccgcggcgatcaagtcggcgatcatgacgtcgtcgggcacggcggaccacgcgggcgtgccgatcaaggacgagcagtacaggcgggcgagcttctacagcatgggcgccggctacgtgaacccgtcccgcgccgtcgacccggggctggtgtacgacctcggcgccggcgagtacatcgcctacctctgcgggctgggcatcggggacgacggcgtgaaggagataactgggcgccgcgtcgcctgcggcggcaagcggctgaaggccatcaccgaggcggagctcaactacccgtcgctggtggtgaagctgctgtcccatccgatcaccgtccgccgcaccgtgaccaacgtcgggaaggccaactcggtgtacaaggccgtggtggacatgcccagggccgtgtccgtggtggtgcggcccccggtgctgcggttcgccagggcgaacgagaagcagagcttcaccgtgacggtgcggtggaacgggccgccggccgtcgccggcgccgaggggaacctgaagtgggtgtcgagcgagcacgtcgtccggagcccgatcgtgataccgccggccaaggccgtcgcgtaggcgtagctcccaatccaatctctgcttgacggtcggcaggaccgttctctgctcgtgtcgtgtctccgaggatgaaggtcatcagtattcagtagctttaggtaatcgtgagtgcgcccggtgtacgtatggcgaaggaagtaggcaggcgactgttgtataggctggaggcagggtacccgatcatctgcgacgcagcaagctca

SEQ ID NO: 9338 - DNA, 840 bp, Zea mays
tgcagtggcaggaaaggtaacaccaattaactttgccatgtatgaagaaaaaatatatatagttagaaagatgtgaaagagaacctagggaatgtaatcagcaattaggtttcacgtaacaagcagactgtttcatggcaatgaagtctattcgtttgtgcaccagaaatgttgtttaggaagacaatccaaccatgatggctcaggacctttgttttagaatctctactaaaaatgaatgccagcaaggcaatgcatatctttgggggcaacaaatagtgccaaagcaggtggcaggggtgattaaggggaaaaaaaagcagcagcctggactagagacaatcacttacccgtctcccccattggacatcatggaggaagtatcagaacccaggaaaaatatgaggggcattggtaggataaggtacatgagaactgcacaaaacgtcaaggattacttacgatgtccctacaaacaattattaggatgatataagcttagtttgccagcattacacaaaaaaatctaacctgttagcattggccaccagttgttatagagagcacaagcctgaaggagcaagaattatagaaatttaggtgacagtggaaaagataacaaactgccacatagatattgaagttagatgcttaccaagatttgcaatacaattccaccagagaccaatatggcaagaagtgcaagtcttccactgtgcaaacatgctctcatacttcgtgatagtgccatcgttccctgctgttttttcacttcagctacaatttctccttcaacacgaaggactcgcaaagctgtcgcctatcctcaaacaaacttca

SEQ ID NO: 9339 - DNA, 800 bp, Zea mays
tgcggtgcactgacggccacaacaaggggtatattctcagccaccaattccaaaagcttgacaccgttggttcaaaataagaagagctcggcactatgaatgaagaataccacctaccctccccactagaaaatagcagacaaagatggcccaagatttgttatttatgatggaccaatccgacatcacgacttaacacaacgagcccggggacagatgcagtgaacctaggcctccccgctccgctgacatcagcccggaccaaacgaatctatcctaagcaagaccaccaaacccattcgcccgacccgataagcaccctacggcaccagcgccggcgcgtcgaggagacgaagcgaaagatacctccgggctgaagccgcttgggaatcccgaatttgacgccgctcctacccgtggcagcgcggtgcggagtaagcctggtggtgagccggaggagggaggccggcggcttcttgctcctccccccgccttgcgctgcgctccgaactcggcgggacaggaggggtggcgctgtgctgccgcctttttgtgaggggagggaggcggaggggaaagcccaatccgctaccctttttgggaggttggttcgcaggggacccagggggttatggcgcaccaactcgagggcagtttcgggtattcaccgaggatttttagggtgcgtggatgcgcgtcacggccgagggccgaccggctgggattggcgtttactggtccgccctgctctgctctggttgggttggaccgttggacgctggttctagaccgcgcgtgca

SEQ ID NO: 9340 - DNA, 748 bp, Zea mays
ggcagcatattgccttgacccatcacacgacctcaccaaagaacacaaactactaaatcaaaactactacaaagttaaacgcaacgaagacccccatccaaaattgtgaaagaactgtagtagcaccaactccacatgacgacatgaagacttaattaattcttggtcctcccttctaggctgaagctatgtccagaagcgacaccaataagttgccctgaaggttacctgcaaacaagatttaggagacgatttattgaaaactacatcattcctacttaaccaaatagcccaacaaattgccgatgcaacggttaataataagttgcgtgatctgggcagcagcccactcgcccaaaccccaaacaaatcattagcatcccgaggaggtctcaaccccgtacttatatgtaacaaacgccaaatgaaagacgcatacaaacacctgaaaaacaggcccaatatttgcatgaaaagaggacaggcccaatattttccccaatacctaccacaacaaatagatggatggtggttttttttattaaaaaaaatcttgggtcccctccatgctggcctgtctaatttgggataaaaccttgacatgccacagtttgtgacgtatgtgttctgcttaatgccacgattatggcttaccacacattcttagccccatgccatgcgtgtcattgaactatttttacgccagactattcactattccccaatccccacttgtgtcatccattca

SEQ ID NO: 9341 - DNA, 805 bp, Zea mays
caacgtcagccaccaccccagcattatggtggtggggaccatcagcgtcaccccacagtagccacttaccaggagttcctcagtacccagccaccgttgttcaccagggcggaggatccacttgatgctgatgtatggttgagggtagtggaatctaaattcccactactcaatggattttgttctgaggtgacaaaggtccgattcgccacccagcagcttcgcggacccgcgcgaacatggtgggaccactatcttgctatgcagccagttgaccatgaagtggattggagggagctcaaggcagctttcagaggacaccatatacccgccgggatcatggaccgtaaactcaatgagtttctggcactcactcagggcaacaggatagtgttgcagtatgcccaggcttttaatgacttgtgccagtatgctggatatcacgcagatacggatgagaagaagagggacaggttcaggagggggctcagcactaagctccgtgaccgtctcaacaccgtcagggccaacagctacaatgagttggtcaacatggctatctcccaagaggactgtatcatagcccgacaagcagaaaagaagaggaagacccctgtggcaggaccctcagctcagccacagcgcttcaggattgtgtccgacactcagaacaggggaccccaacagcagcaagggagatgggtgatccgaccacagcagcagcagcaggcacccaaccgcacccagtttctagctcagaggaacaatcagcagcagcagcagtatcgccaggcaaatgacaaca

SEQ ID NO: 9342 - DNA, 777 bp, Zea mays
tgacggtcctttgatggtgggcactcccacttgcccataccgacggtcgagtcctcgtcgtgccgtgtctacctgccgcatcggacccgagtgcggagtgcagtactgcagtgtcagagacagagtgctgccccccttctctttcctctcgacttgctccgaggatcccaagcacgccgcccgcggcggccgcgtgccgtgtgccgtgcgcgctgcacccggcactggcagacacccgctcttcgacgcgactccccagtccccactgggccaccagtcctccgtccatcactccatccacgagtcagcgtccgcgtccgcgtcggcgtgtccctctccttcagatgcgaggcctccaactccaagggcgaactagtagttgcttggagacttgcagtgaaaagggcacgcagaaaagcgagcgtctggccgcccgcacgccaggagcgatcgacagatcggctgatgcggagttagcacttagcagtcgcccgccgcgacctcaacctgcaccggcgccgcacgccaagggcggagacgccagatgatgaaggatgcgaagtggcctcacgcggtgtcgagcgccggtggaaggcgaggcccccctgcctcatcatccaacgcgggggcgtcgtacaccctcctcgcgtcctccccgcccagcagcgtcagaaacgacggctgctcgccgcactaccctcccgcccctgcgtccgacgacgacgggctctcctcgttcgacgcgtccgtcgctgccgcgaagctgccgttccagca

SEQ ID NO: 9343 - DNA, 785 bp, Zea mays
ggtacccctgaaagtgctggattacttccaagccgcccaggtatgtaacaaatcatgcatgtcttaaaaccatagtttttttcccgaaaactgggatgccgtcatgtaatgacagaaataggactgccattcttgtggttgatgtataatgtaaaacctatgcataatttctagtgtggttgtacatttcttttgtaatactactcactatatgtattaaacttctacgagttggtccagcaaatgctaaaatttcttggtgcattacataaaacctgcttgtggattctctgttactattttttcccaagtcatcatctttcatattactgcggtaatgaccttttgtgtttcgattaacatttctgccaatgtatcataaaagcagttctcttcacaattttatcccagattgtgaacccaagtatacatcgtaaaatagtccaccaaaattcaaatttattatgtggtagttttggatctcaacttggaatccctagtatctaattaactatgtattttatcaagtgtattttgtgacgctacctcactgcaactatacctcgacagcaaagcagagcaacatcatctccattttgttttgtctccgcagataaaccaacaggctcagatctagtccttgaggctgtgcttgaagcggaagttgcggagaacgctaaactgtttgtgtcgcagcctcatgatcagctacctaaggaatgaagacgaagatgatgtgcttgaagacgttgcaaacaggaccaaactgttcaggggtaccgagc

SEQ ID NO: 9344 - DNA, 771 bp, Zea mays
ttgctagttctgcacttgcttaaggggatcaatagattcttgctggggaatcagcttgcaagtgtttcttttccacacacttaaatgtgcatatggttttgttctgctgcagtcttcaatatggaacaatcttcatccaaaccaagttatcggtcaacctgcagctatcaaggaaattgattgcttgacagccactgtcgatgagatccgagaagtcagagcacaagtcacattgccaatcagaatggaagctagattatcagcactggctggatggtttgatgttcattttcgagtatgtcagacttaaactgcaacccactacatgctatgactgaactacactttacttaagaatggtgcttgctatgtttacgataattttcagggtagtgctcaaaaccctggggtggaggaagttgaattaactacagcgccagatgagcatggtggaactcattggggtcagcaggttggtttcctggaatctgttaccagctatagcctgtagttactaaattttcgatcttctcttctcctgcaacctctaaacattgactgctaacaaaagaaattttgcgaatggagggaaaagaactatatattttcccttttgaatttatataggcagagggcaaagcttctcttaaaaaaataaaagagaaggggaaaaaaggaacttaaaaaaaacatgttgatttcaccagaactgctctacaaatgaatgcttttatttgaggcgttaacttttgcaaaacaagatatctttca

SEQ ID NO: 9345 - DNA, 1589 bp, Zea mays
tggaaagctgatctgttaaccaaagctggaagattgatccttgtccaggcagtcttgtcgtcaatgactatttatttaactatggccatggatctacctacttggatgattaaagcaattgacaaaatcagaagaagtttcttgtggagaggaaggaagaatgctttgggaggtcattgtatggtagcctggagcaaggttactagaccaaaaaagcttggggggttgggcatctcggacctgcaaaaaatgaattgggctcttaggctgcgctggctctggctgcaaaaaactgatcctgaccggccttgggcttcctttaatataaaagctcacccttcagtgaaggcctttttctcggcagcggtttcctcggtggtgggcaacggtaaaaacactttgttttggactgataaatggattgatggtcagagtctctgtcagttggcccctcacctggtcaagacggtctcttctagggctaaaaagaggagtgtccacaatgctctcacaacaagggaatgggtgcaggacattcaaggtgctatcacccttaatgttctatctgaattcttcaaagtttgggatctcaccgctcactgggatttacaacaggatcatgaggataagcacatatggctactctctagctcaggtctttattccaccaattcggcatacactggtttcttttttggatcaacaacatttgaaccctgggagaggatttggaaagcttgggcacctggaaaatgcaagttcttcatatggcttgtggctcatggtcgctgctggacaactgaccgtctggcaagaaaggggctgcctcaccctcatctctgtccgttgtgtgatcaggaggaggagaccctaaaccatctgttagtttcctgcgtcttctcacgtgacgtttggttccagattctgaaaattgtccgtttgcagcaccttgctcctaaccttgcgacctcttcctttgaggattggtgggaaggagttgtcacggtcccgggtgatccaacgtataagggactgtcaaagggcctcaattctttgatcattcttggggcttgggccatttggattcaccgcaaccgttgtgtcttcaatggggagcagccttgttctaccatggtcatcaagtgggtcaaggaggagtctcacaattggtgtagggctggagccagtggattagatagcatcctttccgctccaacgcactaatcggcgtccttccttcttggtcatgagggcagttggtcataatttcattgtacttctagctatccttgagtgtgtgtgggtgtgtgagttagtttggcttgtatgaggttttcttatcctcaccttttttcctcttaatataatgatacgcagctctcctgcgttttcgaaaaaaaaaagtttctagctgaattaacacattcaataacccaatttatttctgatgtggaactctgctgagatgaataccccaaagaagaatgtagaaactgtactttttaaaatattttcgaagatcattatatgtttatttaacatatgttgaaaatttgctttgttgttctgagtactgtcaactggaccca

SEQ ID NO: 9346 - DNA, 769 bp, Zea mays
tgcggctaaaaactgtccaacatgaggctgaaaccggacttgggcactaccaccctgtagaaaggcagaattggacaagttactaaattcagaccctttttgcacgctcagtcatgaaacttcaaagagtagatggaatataagcaacctttatggcacgcaagcatgcaaactgggtcacattccagtaccggatttcaccactgccatcacaagagcatagaaggtctgttttctttggatgaaaatctaatgatgtgacctggccgttgtgcccagtgaatgtatgcagagagaatccaggctgcaaaacatgtgagcataagaaatgctgtaatgcaagtgcatacaaaaaatctgaggcttaagattcaaggttagtaacacagatggcacagttcacccaatatattgctgcatttaagtaggattttcataatataacacaatttgcagatcaaaacagaaaaaagaaaaaaaaatggtctttacatgcaaattcaatcatgtcatggttgggccttgctacattttgagacatggtgacaatatggataagtataactagatttgcagccacaaatactaaaaaacactccatattttaatagcatgcaggtgcactagtgaagtatgcagtaggataatggtaacattactataagatggataatagcataatatctacggcccctataatggataagcaaactaacttacatcggcagcattccataatttaatagttctatcaaaagaagatgtgcca

SEQ ID NO: 9347 - DNA, 766 bp, Zea mays
tgcaaatggctgagactccttgatacttgggctaactgaaataatactatcctccagacccattttactaccaggaaacaactttccaggtttattatggtctacagacatggccactggagttgattccactggagcatcttgtccagtaccactttttgcattagtagagtttgaccggagtatgccattaatgggcagttcagcatcattggaagaaatttcattgggggtggactgcccatcttctaaacccacatgacctgcagatgtaggagacctgaccaagttgttcacatcccctaatgttgcatttccgtttgatggatttggtgaagttagccctgctggttgctctgttgcatctgcattatcattagtcagagaagggtcggacaaaggtgcatctgagtgagttgtcacctcaggttttgattcttcatcaggctctccttcgtccactacacactttctcttagtttctgtcttgtggccggcatctggagacttaagctggtcagtgtggcttgactcctctgtatgaaaatgctctccatttgtaccatgttttggtacaccgccccacttgtgacagagtgctcttgccttttggttgatcacggcaattctgtgagccagcaggtgaccaacagtaggcataaccccacaggagactgattgctcattgctgatcggaagacagtccaatgcagtcaatatcgcaactatgagatcctcagcaggggtaccgagctaaaatgtcgta

SEQ ID NO: 9348 - DNA, 817 bp, Zea mays
tgaaaaaggcgatcgtcccaaccgaactccaccaaccgtctgtgcgacacctcagcatatcacgagatacacaggcgaggatatagtccagatgaatacaaatggcgagactggaacaacagcaacaagttcgaaaacaatattacattattgcaaatatcatccaggaggattacgcaggcctcaaggtctaacaaaaaaaaaacaaggccacaagataatccacgacgaatggtaaagggtggaaccgcaaaaaaaaaaacttttggaactcgacagaactactataggatcccaagcaacctcttacaccaccagtagtacatcaggtatcgatatcatattgaaataaacactaggggaggaaggaaagaattccgacacggcgaacacgccttctttttttcttaacaggggttaattaacaaaacagagaacttcaatcaatgagaccgatgctgccggggtgcagttctacctgggttggccttggaacaaccccagacgaggaacttcattcttttaacctactgggacctcaataatgcgtatgatttacctccaaaattaaagaaaaaccaatctctgagccaccaccttcagctatccatctttgttgaataccataattgacagggggaaaagaacttggaattcagtagataagaatatagtaccctcacaccttccaggctcgttgcacgcctatgttgctagactaccaatctgctgatcaagctgcatctgttcaagcagtgcccctaaaaccgcggcttggtcacgcccatccaggggtaccgagctggaattcgaatca

SEQ ID NO: 9349 - DNA, 800 bp, Zea mays
ggaggaccacctccaaatctaataggatcattgtcatttgtgctaccaaacatgaatagcgtccccgtggttggcgaggcctggccctgaagaattgcaaggaaacaaaaaacattgctgtcaggtacgaaatagcttcagtatcggagttcattaaaataattgtcctagttgatacctccttagttaatttacatatgaaataacatgatgattcaaaatacagatatgaatatgaagagagcaaacacatgaaattcctatgcagctttgacaacattaacagctattatattggagttccaagtagtacataagggggaagtttggacctgaagtgtgggggcatacattgccacataactatggaaagaacagagattgatcatcatattcttgctttcaagaaaactttgaaatatttgaatggtacgatactatttttctgcttttgagaaaacaaacagaagcctgtttggaaagaagagactggatgctacaaaacaaggcagaactgatcatcatggaactgaagtagagctttcacgaactcccctggagaggtcaaaagcttattaaagcaagcattcttgaactgtcagtttagcatccatagacgaaagcaatactgattctggtaacgcgtccacaccctatcataacctagagaagagcacataccatggaattagaaacgaagactggtgactccagcagcgttgctgggctcaggccaggcgggatcgtgaggtagggcgatggaacttcgggtactgaattgtcagctccaggggtcggag

SEQ ID NO: 9350 - DNA, 1041 bp, Zea mays
ctcggtaccctgtctggggaagaatatcatctgattttgaagtggttttctgcacatcataagcatcttcgttgtcacccgcctcagcacggaggacctcatcaattaactcgccaaaaacatcagatagattgaattgtttctcaacaatctgctgaagagtctgtttaataactgaacacgccttaccaacctccgcatcaaaatgtgacagtttctctatgaaacccatgcggtggcgggatggaagctgattcagcttgcttgatatcaaatccctgatgagcgggagttcgatgtgaattgagtgctgtccagatgggtcaggatgaggtacatcaaaagtgttggtcctggtcttatgctgttgtaaattgaaaattattaagtaaatgtatagcatatcactgaatattatgttgaaattctatgacaaacaaatatataaatagaatcatgccttgaattgtgcatgaacgggtggtacagctgtgtagcaggtctctgaggagcttcggaactaaaaaaatgtgtgaaagatggagtaaaacttatacaaacatattaaattgataaatgagattcatatgtttaatggaaaatgcaaaaaaaacatcacaaatatgcttacaaacgggcataaaggtatgtgaacgttatcatatgcatgtaaaaaaatgattgacacataaaaaaataccgagcaatgtccaaatgattcttctcctttgcgtatcttgcccttgtcagctcttgtcagggcttgaataatattcctatcaaagtatttgattcgtggtgttccacgtttgttctggggtgccgctgagtcatgaagatgatccaaataatacagcttcggccgcggcagccgcgggagaacgaccgacctgggcgcctccgcctcagcctcaggctcaggccctcagccgaagattcctcctctacagactcctcctccgtgtccggcacgtctataacctctgtgacggctgcggaagcggagctgttgtccagggagggatcctctagagtcggccg

SEQ ID NO: 9351 - DNA, 839 bp, Zea mays
tgagcagtgactgtagcctctctccctgagtggcaatgtccccaacaactgtctgtatcctcccagcaacatgccgtaacctgtcgtacctcatccgaatgagatctgggctcttggaggttgggaatgtgtcgaattcctcatcaagctcatctgggtttgcaacatcagcgtaagaaatccttgtgttcatgtgtggtgggaagcgtggccggaaccggtagttccacagccctatcaagaacatgtagaggaagactgttggcaggataaggtctggatagaacacaagcatgacaaagagcacatgaaccagcactgtggtgacagggttcttccactggcaaacatccccaaaccacttgcccgcagcgatgacccctgagaagacttgcatgagacggaagaagttagccttgctccgccgcatgctccacaggtgggagcgagcatctgacatgaactcaacgacctccttgcgaactggtggctccatgcgccccaggcgctgcgcgacaagctgcacagcctggtgtcgcagcatctcctgctgaactattgacagaggctgcgcgtaatgcatcttgggcaagaggggcctagagtatgtgaagagcacattgataagggacgcggctgagaacctgatggcgagatggagctcgcccatcttcttgactcctgacgggccgaggacgagcaacggatatgagtgcgtgtacacacgccccgtctcaagtgtcgaaagccggatcctcactttcccgatgggtttatccatgtggcctgaggaaccgtccttgttatcatctccacttatgtgacaggggtaccgagct

SEQ ID NO: 9352 - DNA, 844 bp, Zea mays
tgttcgcctccgactcgttgaagcgcagaccgaagtcgtccgggtcggtggtgcggaggaagctcgagaagtcgccgaggcggatcggcggcaccccggggatccagtcgatgaccgtcgtctcgaggtagccgttcgtcaggaaactctcatctacaggccgccggccgcgcgccacgttggtgtcagtgtcaccgcgaaagcgagcaggctaggtgcaagcgtgcgtgtgcaagattaatttgggcggtgccgcggtgcttagtgcttacccttgagtggcacgtaccctctttcctgcagctcgcggagcctcatgtgtgtcatcagcgaggccgcgctggccgtccagaacgacatggtcgggatcccgagctcccgcgccacgcccagcgcgaagctcatcagcatggtgggcagcacgcaggtgaccggcggcacgtccggcgtgccgttgagccgcgcgatgaggtccctgagcggcgcagcgcagcgcgtgctcgtggacacggccaggctgcgcccgtagtcctgcttgccccgctcggcctcggacaggccgtccgggatggcctcgaagcggaacccctccccgccgcgcacggctccggcgccctcggtggcctgcacgcgccggtggttgtgctcggtgttgacgaaggtgacgtagacgccgtggcggtggagcagcctggcgatatgcagcgctgggttgatgttgccggagcatgggtacggcacaaccacgacgtgtggcctcgccattaccgcgagattgagaccttgcacgcttgatgacccaagtagctttacactcgatcgggtcttgactcttatctttgca

SEQ ID NO: 9353 - DNA, 832 bp, Zea mays
tgccggtaattaagataaaattgttactggggaatgaaaccaaccaggtactggaaaacatcatttcttgctacgaaatcagtttcacagttaagctcaactacagcagcccttttgtcatcttgtgcgatagctagcaaaccttcagcagcagtgcgtgaagactttttggcagcaagagcaacacctctcttccttaggtccttctgtgcagcctctgaaagaaattgacaaactcaaataggaaaagcgaactaaacaaataagtcaactaaatcatgacatggcatggagctagaagagcaaaccaatatcccagttgcaggtaactagagaggccttgacatctttgattggagcactcgttctttgtctgagttgcttaataaggttcatttgctctgaagaagacacctcagagccgaatctcctaataaacactccatcttggggaacatgagtgctcaattggtgagtctggaatgctgaagaagagtatgcccgagcagtttggtgctgagaacgaaagagaagccctagtatggacctcttagcaccttgaccccatgccattctcacagaatatactgcagcctctgacggcgtacgtcagtacgtgtatcaatgattttttttcagcctaagaaacaatatatgaacatcataacagtacattttcctttgagattagatcgctttttgaacgtaaactttgagataaaaaatattttatttttactcttttcacaactctgttaattatcactccagcgcaaatggattccatcaaggcaattagacaataccacacagatctaaaacaaaaattgca

SEQ ID NO: 9354 - DNA, 884 bp, Zea mays
attcgagctcggtacccctgactattaatgcacacaacggcgccgtcgtctacttgatcaccacaccacctatccaaacttacctaccgtctgaacaattaggcaaggaaggaaggcaatctttgaagcctaaagaatatgaaaattgaaaagaaaaacaagctaaagcaggaggggaaaaggatcgtcgtcggaggaggacgaggaactcacgttacggcggtgaagcttggagtttgacgcggcggtgctggagccggagaggaagtccagccgctgggtgctggccaagttggccggcgccgtcgggtgaggggagatgccaccgttgctggtcgccgggccggcctgccacaccgtgaactgctgcgtggagttccggggaagctccaccgtggcgtagatggtgtacgcgcggtcggagtactcggcggcggggccggcgggcaccttgaacttgagggcggtggtgttggtgaggctggggctggtgctctccaggttggtcatgaggatggacacggcgccgctgccgtcctgcgaggcgacgaagacgctgctcccggccatgctgccgccgctgtcggggttgatgccccaggcgacccagccgctggggtccgacggcgcgcggaacgccacgtcggccgtgccgttctccgggtggtacgtccagtgcaggctggcgctgagcgacggcaggctgttgcacttcccgaaggtccgcccgccgctgaacgtcgcggacaggcagtcctgcgccgtgacggcggacgcgagcagcagcacggaggccccgaggaggaggaggagccgcgccatggatacttgagatggacgaaggcagcaagcaggcttggtcggagctgcagggggatcctcaa

SEQ ID NO: 9355 - DNA, 835 bp, Zea mays
tgcatgcgttggcatccttccttcgtcatcatgctgctctgagtctgctcccctctgctttctttttcccttctctgcgccaccggcttcaccatatagctcggagagctcagccctggctgttagtgcctctgcttcatcgtgcgagcgagggcatttggattcggattcgaggcggtgcactgaagtgcctagctagtgcagggagaagcagcaaagctctctctctttctctctcccttatatgggagcaaggccggacggggcgccgggggctgtggagtgctgcggccgcaggctggtacggctgctagccttcctcttcctggtctgcgcttgcctcgtgatggccgccatggtggcgacgacggacggcggagcgagcttagcagggccgtcgtcgaacagcgctgcgtcgtccgccacgaagacgggcggctcgccggcgtggcgttcaggcggacgcggcggcggcgggacggccgcagacgcgttccggagcagcgagaggaggatccccaaggggcccgacccgattcacaacaggtacgttgggagctagttagtgcgctgcctgcactgcactgcactgcactgcactgcatgcaggcgtgtcctccctgtcctgcggctcgaacacctgcagtgcagatgctcaccttcgttgggatttgggaacgtgctgtgctgcctgcaggcgtgccgggaagacgacgaccgcgccgcgccggagagactagctagcaaaaggccgaccgggggcgccggcggcggcggcatcagaagctcgcactgccggtgctcgtggtctagcacccgtttccaggggtccgag

SEQ ID NO: 9356 - DNA, 851 bp, Zea mays
agctgttgatcccttcggtcgactctcatagatccccctgacctaaccctgagccctgtgatatgccggttcaggtcggaggcagcaaggtggcggacccgaggccggccagggtggtggacctatcgcccgtaggcgacaggtcccgcgcctcctccaagaagaaccgccgccgccacaagaaggccgacgccgcctcttccgtctcgcccatgcagaggctcttcgacaccagcagggaggtcttcgccaactcctacccgggcttcgtcccgccgccggacgccgtcgcccgcctctcgggcctcctcagtacgtatctcgctcctttggtccttgtgcgatttgtgttgattgaaacccgccatgtttctcgtgcttaggatgtggagacagcgatattatccaaggtttttactgttgcgttgcgtgatgaggatgaggttccgtttttggtatgcatgcttgttatccaaagccccttggccttcgctgcctttgctatgcatgtcgcggcaagctcccccatcccatggcacactgcaaagagctagccagagagtgatattttaaccaacaccaaccaaccaactatataactactgctgccctgccatgactgtagtttttcaagtacacctgtttaattagaaatactgttacatacatactcttgtcgttgtgggggaagggaaccacggaccacactccgatccgtgtatcctgaatctgccattcatcagtcatggtcgtcaggtaggcatgggcgaccatgacacaactccaacaatgcatgctgcgtgctccttaacttgggcatggaatgcaagcatagctgctaatgctatgca

SEQ ID NO: 9357 - DNA, 879 bp, Zea mays
acgaattcgagcctcggtacccctggtttaggcgtgagcagaaggatcgtcctctcatataaggaccggtttgtcatctttcattacctgtactctcaaaaagtacaaccactcgaggctgtgtgggcagccactcaatctgaactcgtacgatcccaccccagggttatgaaggctggggtagcaccgggaggataaggagggggaatgttttgtccggtttggacatggcggtggcctgactccttccggtataaccgttaaggttaggacgtgcaaggaaggaaagagtttcggatttggatctcattggccatgagatcgcagagccggactagtgggtaaagtgtacccctctgcgcagagtctaaacctattcgaatagtccgtgtccactggtatggacgagtctggtatggtatgacaattagtgtttctactacaactgggaacagggaaatgtgtgtgtgtgtttctggaaagaaaatagtgccacgggagcgggaagctcagtggtggtcaagcaaatgtcatttctattgtcttgggaaaaccctcactattgagtactgcctttctctgaaaaagtatgagtgacttcaactccaccatataaagcatgtacaatataggtcactttctctttacgggagccgggtgggcttgcggaatacctagtgtattcacccagatttatttatgtttttcagcagctgaagacttcttttctgctatgcttgattgatggggctgtgtcttcacccagttctgcctgtggcctgggctattttacattccactacgctttatgattttcggctcactctcgagcttgtatcccccggtattgtaataacattattcagactctgtaactat

SEQ ID NO: 9358 - DNA, 798 bp, Zea mays
ggccaagcagagtgcgcgcatataattcattaacaaataaaaaatcaccgtggtctctatcacataacaaaggtgaaggttcttagttgcctgtaaactgcctctgcacaccataccacaagtaggaggaaatagttctgcctaataaggaagtatcgataaactctgtcttcttaccgggagcgggcgatgttaccacacaggatgcacttgggcttgttaaggccccggaggtttggcttgggcatgtcgaaggcggcggcaggaataggaggcggcttctgtggtgtcccattgctgttggccactgccggcgcaggagcaggactagcagcagagggaggcgagtcaccagccaccaccttggcgactgcagcagcggcgggcttcatgtcctgcatggttctcctcaacccggcaaaacttgtggggaaaaaaagtaaagtcagcaaaacttgtggggggaaagtaaagcgcagttcagaggctgggatttgaatttgattgtggataaaaggaaatccagggggggagcatgcatccaagcagtggcagacccaggattttaacctagccacctagggtatgggaaggccagaattcagtatttccccaaggaacggaaacagcaaattttcatatacattcggaaacatacgtatcagtgcttgacacacaaatctgcagtaggatttcagtggagaatcacgcgatgctgccgcgtcagattaacaataactttgaaagcaatatacattcaaaatctctaacctaagtgggaagtaggcactcaccagg

SEQ ID NO: 9359 - DNA, 806 bp, Zea mays
tgccccatcccatccataatccactcgtccgtcctcgacgaactgtataatactccaatagtaggatcggtccgtgacgcctcgccgtgctctctgattctagtttataatgtttatggagtggtctataatgtttcctggccagtgacttccaagctagcctgttggtggttgcagcgtcctcgccaattaagcccatcctctgattagtttcaactattctagacaaccttggatctgctctctctactctcttcattcaaacaatctctgcacatgtattcccacttgctacctctgactggccagtagaagataagagggttttcagagccatacatatatgtatcagcagtctgcagcgctaactttttttttctctctctctctctccttattattaaaactatatatctatggtctgcactgttgttgccttttcctttgaagaacaaaacaacttcctgtactgtttccttcaggaatgtctaggataggagacatgtcctcacttctcctgtgcagagaatgaagtacttccccatcctaaaataattaatattttattactttagatataatatttgattatttattttattcagctttttttataaataataaaacaagtaaactattgttaaagtatctgtaatgataaaataaattataccaaaatatataaatatcatttataacctttttttgaataagatgtctaaaagtaaacagtctcaactattttggcatatggagctgtatagctagtggctgctcctgttttactacaaagattcaggcagggt

SEQ ID NO: 9360 - DNA, 815 bp, Zea mays
ggttggagcattacgagttcccttgtggggaaactctaggggtacccctgtgctgtgaccaaaacagccaaatagattcctaagtaggcggcgaatcccgaccttcaccgccatccacttgggccatctccctctggccacgtcacccgcctcggcccaactccgttactgaagccgccgtccagctcagtgtagacgaccgggagctgctctctaggccctccggcgaacctccctacggcgaatccaccgcgtggaagtcgccatatggtgagcccagcatccgcctccgcatctggggtggctgcggccggaagctcttggcggcagacggggcaggagttgcggagcgagagccagggaaggatgcagtcctggtggtagacgtgcttgcacggcatctcccggccggcggcgccgggctcaaaggcctcctggcacacggcacagtgggcaccacctccggccaccgtcaccgacggcatggattccaccgcagcctttgacgccggcggacgcggagccgccgcctccagccgcgagaactggtcgagcaggcggtggaaaccggaccccatgaggaggtgctggacgtcaccgggcagcggccgcagcccttcgcccgcgccgtcgtcgtagtagagctcgaacccggaaagcgatccgccgcggagcacgatgaccgggttcatcgtcccgcgccggccgctcccgccgccgccgcgcggcggcggctgcgtaaactgctccaggaagccgccatcgcactccgggcagacgacggtggacggagataccctcacgaagcggctgca

SEQ ID NO: 9361 - DNA, 949 bp, Zea mays
ctgatgcctgccgtcgactctatagatccttctgcaagctcaaagaattcagagcaataatcatacttgtcatcgtttagcacctttaaagccaccttccatgaacggacagcaaaccaattcagtccatgcagccctacaatttccttttttaggaaaacatccaaaccaagctcacccattcgtagcttgacaaccaaggattccactgttgccttcctagatttatatacttgtgtaatgttaactccagacaagtgtatctgatatatacttatcgaagtcccttgaagaaaaatcagcaaacaaacactgaatattagatgactgaaggatggcaaacccagcagctgaagatgaattttcatgtatttggataaggttctcctgtaaagcatgaaagcatctaggcccctggttggttttagtgattaatgacaacgtaatgttatatgtgactaacgtgtgttttgcagagacaaatggtaagttaggtcgcattacaggtagaagtactacaacggtgaaaacaatcccggagataagaactcgaagcgacggctaaaacgacaaaacaaaaggtgaaggactacggagtccgagtgtcaaggagatgtggacactcgtaatttggttaggtcttttattctcttttagccgtactataaagaggggttgtcgatgagtagtttgaccaagagagttctggtgtagtgttggtgcacaaacacacttacattcagtgctaggtgtcactctagaactcactcacaagttagaacaaaaaccgatttgaaaaacagtggaaaacagaaaatagggtttctaggcttggggcaccggactgtccggtgcgccctctgctaggtggggtcaagctggcctaggggaagggtttccccttgcagaaacccgagagcgcaaggttcccgagtggaattttaatggc

SEQ ID NO: 9362 - DNA, 881 bp, Zea mays
  unsure (1)..(881): unsure at all n locations
aaaaaaaaaagaaaaaaaatttgaaaaacttttgaaaaactctcgctaaatacccctgcgcatagtttcgtcgactcccagtcccagatgctgataagacgcgttgccggtcatcttgaggtccgggaggaggtgtcaaacgttgtagataactagataccganttttttttttaaaaaaaaagaaggaagggcctgaaactgaacgcagcggcgcgattagaataaaatggatgaatgaatgaatgaataaatagtggcgacatgaacaccggtccggacaaggtcagaagattgctcgtcctacccgcacctccccaccaaagaaaaatactcctatacgcaaaggtaacctggcatggcagcagcaatcaggcacggacattgcaacagagatgcacatgagagagactagggccgtaggcggcgttgttctacaggtttctcccagtcccagtcccagagaataaactagctagaccaaaaaagttactatatcctagtattaggtaggctgtgtatcttcaagaggtactctctactcgtttaaagcacacagtaaacacaggatgttggtcaacactaagaaatgcgagcctcgatttgatcaattaatagaataggcttagccgacatggcgacatgcattgcatggcacagggctacagctaagcatagatggcttcttggaagcaaagcaagcattagaggctcaagaagagtgaggacccaaaccttatcaaatcatactgaaatgccaaccaccactctggtacgtcacttggaagcagcaaccaatagtaaccagaacgaaggaacaaagcaggccagcacagtgaaatacaaagagagatgcaagagaagctgggggagaagtttgca

SEQ ID NO: 9363 - DNA, 762 bp, Zea mays
tgctggtggattttattcagaaaacattcggtcttctttctgaccagaacgaacgtaacctcgcctgatcctgatcttcttcttcttcttcttttgcctgtgttcgttcacgcagtcatcggcgacgtgaggggaacgggtttcatgctcggcatcgagctggtcaccgatcggcagctcaagacgccggcgaaagatgagatctgccacgccatggaacacatgaaaggtaactaactatatataggaaggtctttggcctcagaatcgaacggaactatatatcagatgcctgcagagtacatggcaactatatgcaactgcaagtgaatgcaggtcctctgatgattgtgggtatgcagatatgggcgtcttggtcggcaaaggcgggttctatgggaacgtcttcaggatcactccccctctatgcttcaccaaggaagatgctggtacgttagtaatatatataggaggtgtttgtttgtgattacaataagttagattatatgatctagacagattataatcacaaacaaacagattcatagactgctcggtgatattcttagtactatatagtactagtttaattaccttttaacactgggttaatggcattgaatcgaatgaatctctggggcgaataatgcagatttcttcgtcgaggtgatggacattgcgctgtcgaagctctgagctgtggccgtcaggcggaggggcggtgtgtctgtctgtatatataatcctcgcccgagtttagca

SEQ ID NO: 9364 - DNA, 769 bp, Zea mays
ggaggggcaactgatccatgggtccgtgctggttcaaagttcgcgctgcaaaggagagttctgcgtttaagcaaacctccacgacgctggaaagttcccagttacgctgattatgttaagagaaatataagagaggtatatatcaccctcactgtcctcattgatggctaaacttcacttttttggtctggtgcatttccatgctaaataatctatgcttgttattcttctattattaataggtaagcattgaaggaaggccattgaattgcgagacaggagcaaagaatgtattttacggttacgatggggaactttgtggggtagaacagttggctttacaatattatgctgatgaaggtggtggttggcaaggtacccattcggaaggtagcatttggatgactatctttggccttctaatgtgggatgtgatgttttcagacatacaagatgttttccagtctaaattccaggtatgtgacctatgaaccatgtttttattttgttctgaggcgcataaccatattccctgcaaagtcatcagaaacccaccctgtagcgtaattccttactagatctctgttgattttgtatgatatatagattgtttgttggaccttgtcaagatcttttttcttcgttccctactgttcttcacaactcttggtaccttacagtacgacttctttgttctcttgcagacagccccccttgatctgggaacagacgatttttacaaatctagagagaacattgcagaatctca

SEQ ID NO: 9365 - DNA, 823 bp, Zea mays
tgcgccagcacggtgttggtgacgacggtgcacgccacgatgggcagcacggccagcagggtcttggtctgccgcacctcgcccgccgtgcacagccgccactcgctctccggcaccgtgtccgccgcgtccctgatgcacgccttgtccaggaacctgccaaagtcaggtcaggtcacgtcacgtcacgtgtccgaatactgaacgcagaaggtgcacgaactagatgctgacctgaacttgttggcgtggcggaagtcgccgccgtcgacgacagccgccgcatctccggccgcggtgtgggcagggttggaggagccggaagggcagatctgcttcctcttgctgaacgcagcaacgaaaacctgacggggtttaaattaattgcgcagtcagccattttttttttttttgcattgtgaacttgggagtgttttctgtcaatgcaagtcgtatcctcagttcctcacccttgcaatgggagtgaagatgacgctgccccgggggggcttgttgcggtacaccgccgcgcctgacgcgagggcgaggagcccggcgcccagggcggcggcggcgaggccgaagccgacggccatcccgaagcgcgtctgcgcccagaccacggccgtcagcgcggcgacctcggcgacgcagtagcccaggtaggagaggttgaagtaggtggagaggcgcttggcgcccttctcccccgccgggaactggtcgccgccgtacgcggtcatgttgggcatgacgcagccggcgccgagcgccaccaggtacagcgccacgaagaagacggcggccctggtgccgccggccc

SEQ ID NO: 9366 - DNA, 833 bp, Zea mays
gatccccctgcacgacccgtcgacgaaatggtggaacctgttcctgtccctgaacacgatcttcctccccgtcgcctccgacaccagcttcagcacggcgtggcagtcggcgcacgcgcggaggttcttcacgatcttgatgcccgtccggggaggcgtgctaatgagcccgaacgccagcgcgagcttctcgctgtgcaccgccagcgccctctccttggccgcgtcgtcgaggtcgtgcagcaccagctcggtgtgcggcacgtgcccgcgcgccctcgcgatgctgttcacctcctctagcttggcgtagatctccgccgaccgcgggtggctccggtccccggcaacgaactccaccacccgccgcccgacctccacggcgctgcacccgggctccttctgcacgccgctcgccctcatcatcgaccgcacccgccccacctcccgccacttccccgccgccgcgtacatgttcgacagcagcacgtacgtgccggagttggccagcccgttggccacgaggtagtcggcgacgcgctgccccagcgccaggttcttgtgcagccggcaggcgccgaggagcgacgcccacatcgccgcgtcgggcttcgccttcatgctccgcaccaggtcgaacgcttcctcgacgcgcccggcgcggcccagaaggtccaccatgcagccgtagtgctccaccttgggcacgatgccgtactcttcctccattgccgccaacagcgcgcggccctcgtcgacgagcccggagtggctgcaggcgttcagcacgccgatgaaggtgatgtcggtcggccagagcccctgcgcccgca

SEQ ID NO: 9367 - DNA, 751 bp, Zea mays
tgctgagtatttatcgaagctggctctccataaggggagcaaggacaacataaccgtaattgtagtcgacctcaagtcacataggaagatcaagagcagagcataaccgtggattcggtaagacttggacagtagaaatggttgttactacactaggacgctagaaaggtggagaaaaggctcctgttcagtctgctgcacatgtacactggttggcccaacactagtctttttccacaaccatataggctgccacgtttgttcagggactcatacacagatctaatctggttagaaattgggctgacgaagtaaggtaaatctgaaatatatatataacatacatatgtagattccaaatagctattactgactgggtttggggcattgtttctgtttctaacaggtaaaggtacaatagaaaccgccagcattaaactgtacctgtgctacttgtgttttggtatattgatgtctaggagtagcagattagcagtgcaaagaatactacgataccccaagttgtttctgcaacaaatgttatgtgcatgtatatcataaaataagaccatctgtaatatgaattcaattcttggcatccgacgttattaattcagttgattgccaacaggatggttgttttgctgctgagaattacatctcattcggtctgattttgccactcagccacgctgatagctattgaactttgacagtctgacgagatttcggaatccaagctgcatcatca

SEQ ID NO: 9368 - DNA, 832 bp, Zea mays
agcagagaaatttattgaacacgtggttccatcaccatgtaagatgtaaatgtgtgttctcgaacgaagaagcaaaaaaagagacaaagagaggtggggattacatggcttgttggtgggctcggcctccgcattcccgccgccgtccttcctggtgggcaagccgggctcgtcggaccccgctgccatgtcgttcctcatgacggcagcttccggcaagccgggctccgtcccacgcagatcgccggtatccgcgccgtcgccgtcgtccagcgtctcttccggagggatggtctccgtctccggcacggacggcttggacgaggccagcggcgcgttctgctgcatcagcgcggacgtgttggccgtgctggctgaggaggaagtgaggaaggcagctccggttagactcgtgaggaggaggaggaacggacaacggaggggtcggcgagcgcactcaccgaatacaggggagtagaccgcgaagagcttggcgagggagacgtaggtgaggagcgccaggcagcagccggcgacgaggccgacgcccagcttcttgggctcgaatttggacgtgaggccccgcatgaggcgcgggggcagccgccgctcgccgcccggcagcttgttggacgacgaccgcgagtacgccgtggacgccatggcgtgccggggccgcggcagcacggctcagcggaaggggaaggagagcgaggaggatcgctaatgcgcaggcatttgtatgcgggcaggaaaacggagaagatgcatatagagttggattccagatggtggtgttcggtgatgatcaggggtaccgagcagtgcagtt

SEQ ID NO: 9369 - DNA, 814 bp, Zea mays
atgtttggatgtcacaagttggcaccttcccgttcacatatttgggtttgccaatgggcctcatgaggccgaaagtcaaaactatctccctctcatcaccaaagttgaaagaaggctcagtaccatcagttcttggttatctatagcaggaagacttactctggtcaactctactttctcagcgatgcccatctttacaatgtgcacacttaagataccggtaatggtcattaacggtatcgattgtatcagaagggactgtcggcagcagttaaacaatcagaagggactgtcagcagcagttaaaatgcgcacttgaaaccctctggttgcctaggacaaagtgtgctgtcctagaaatagagggggcttgggtgttctcaatttgaagattcagaacacgaccctcttgcttaaatacattcacaaattctatggcagagaagacataccttgggtaaatctaatttggaccactcactaatctgggggcagggtctcccatggctaccctaaaacaggctctttatggtggaaggatgtttccaggctggttgactatttcagaggccatactatgccttgggctggggatgccagaacaattctgttgtggcttgatgtttggaacaatatctcccccagattcactttcccttgtctcttctctttcgccaagaaaaaagaatgctaaattcaagaatttttaaccaacatggatctagagcacaatttccatactcctttatcttctcagaccgctcaggaatatcttggtttccacaagcttgtgagttaccttcagaactctaca

SEQ ID NO: 9370 - DNA, 787 bp, Zea mays
tgccaaccatccaggcacaaaaaactgggaaagcaattagaatttttatatatatagagggagaccaaaaaaacgagacgaaagcagtcagagctggtggatatattcacgacttcacgtacggcaagattagtggttgtggttggttggctgatgaagttcataaatccgagttgtactagaacagtgccgcctgcgcaatgaatggcatctaaatggtgtgggtgaggtctcttgaatgcgtggcacaagtggcagcagcagcaccccaattctgctgtgctgcctacaaaaaaaagtcattgggatgcagcagactgatggttgtgcggcggacgaagtcgcagggaaaccaggaggaaggctagtgcagagaatcagagctgtctgggtgaaagggcaaaggcaagcagcagagggaggccattacgtgtctccttcctccaggttcctctcggggctgccatggatttgctcagcagaggggcggtgttcaaggccctggtgttcctctgcttcatcagatcgtctcaaggtatatatattccgacttggacattactggatcatctatccagtttttttcttttcttagtcctcaagtggcacatatatacatcacacaagctgctgaatttgcaggaggagatctgaatctccctcccttggtgaaggcaagcaggttccccaggttccaaagcgaggcatacgactacatcattgtcggcggcggcacggccgggtgcccgctggcggccacgctgtcccacaagtacaaggttctcct

SEQ ID NO: 9371 - DNA, 815 bp, Zea mays
gacgactctagtaggatccttctggtaaaaataagctggtggatatgcaatcctggctgataaaaaaagacgccagaggaaatacctgaagatttccgacgataataaagcacataccgagatatatcacacaaacacctcatgagtaataagtaagcgtgacggctgcatttgtcgttcttacctatccagaccatgcatgaggagctacaccatggctaacagagctcaacctatcatgcagggggttatggtctgcaggctggcctgcagccaccatacggagtgcaagaccctcaacctgatccttcgagtaacccatccgagtaaccttttcagcaatgtctatcggatggttcagcactgactggggtcccaagtgatgaagcaccatgggagaactgccatgtgcttgttgattaaggacagcaacaatagtagcaggattgctggaagggcttccataagcagggctataggtctgtgcattcccttgtaccgtatatgacgctagaccgcatggactaactttgcttggcggaggtacaaatgagccattgccgagtgaatgaagctgctgatgctgctccgccagtggaacagaaactgtgttgctttgtacataaacaggagcagcttcatgatgcttccggtgggatgaagaaattgtagagtatgaaggtggcacaactatgcccccactgcgtgcctcagcattaccacaggcagactgatgaggcccgtatggaggatatactactgtgacctgtggtgtactatgagcatgtggagaggacgtttgcaggggtaccgag

SEQ ID NO: 9372 - DNA, 830 bp, Zea mays
tgcaggactcgcttcggcgtagcctctgcgaccacgtacagcatgcaggttcagaggagaaacgcgcccaataatataatccggcgccaaaccagaggaagacgagaggaatgaaaagagagcaatgcaagaaaagatgatcaagcagctagcagcaggaggcatatgcacgcaaggaaggaagcacacatactgtcctggcctccgagcttgtggatggcgtggacgaagcagtggtgcagatcaggcgtccaccgcaggcgaggcaccttggacctgttgtactgcctcactcccccgctcctctccctggcgccgaccatcgtcgttctcaccatggtcatctcccggcctcagcctcaagctacatacaacacgaagaacgacctgccagcagccggcagccggttgccagtagcttatatatttggttggatgcccagccacttcacatgcacgtttatgcacatgagtagtgaccatccatcagccaggctagctagcaagctcatagtatactcctagctagcagtgctgcagtgcaacacttttgccgctggagagagagagagagagggaggaggggacagcgtagagagagaacgaatgagaatgggcgagctagcagtgagaagtgttaaattttgctgtgtactccctctcctcctaggccagagagagagagagagagtgtgtgtgtgcagtgcagcactgcagcggcgagcaatgcaagagacaaaaggttggagacaaatggggtgtttcagatgcggtcagagcatatgcctggcgtaggaggggataattatgagattggggcacagggggat

SEQ ID NO: 9373 - DNA, 802 bp, Zea mays
acaccgcccagtatattgttagacaagggctattgtatcgagtacaaaagaatacctctaaccagggaaagagaagcattagctgccgatgtagatgctatacaatcatcaattgatgagtacgtacactaattcttgttatataatctataattttgtgagttgcattgctcagttacaggatacaatactcactattgcttctccacagatctgctaggtactatctctttatttcacacactggatatggaggtgttgcttatgcgatggccattacctgcctgggactgagtgcagatgcaaagtttgtaatggaagaaacagcagaaacacactttgtatcaacatctcttgcgaaaaatgtgtccatcaaaactaaaactgatatagcacttaagcagggtgactaccgtgacatattaaacctcactagagtgttggtacatgggcccaagagcaaaaaagaggttgacacagttattgacaggtattatggagttgtttttgctgcttgagatgtgcttttatatgaatgaattaaatacattcgtgaactaactgcaagtttgacgagtttcattgttgatataatcgatcttaacattgttgtacattttcttaatttcccgtttcctccttgaaggtgttctggtgctggtcatctgcgcgaagatattatgcattacaggaaagcactgcaagattgttcacatgacgacgacgacgactgtgatgaggaacactcttatctcactgatatgggcacaaaagctttgaggtgtgtttaatttgtttcaga

SEQ ID NO: 9374 - DNA, 815 bp, Zea mays
tgaggacctttaggagcaccaccgtataggcactacaagcagatcaagaaccaaaggttaaacaatgaatatataaaccagagatcatgacagtgagacaaacattagacaagtcacacagatcaacaagtacaatataataattcacaatataacttcaacacatggtcaacagtttaaacattcctcagaaggttttttgaattaataacctggtaaaacataaaatcgtgaccatttgtatattaaaatagatacagacagaacaaaccgtgcaagaaattctagatgatcttccaaatttcatagcttcatccagaatctgcgttgcaagttcccttgttggggccaaaactagcactgttggaccattcctagtgctgttctgcaggcgcttgatatgcataaatccaggaagtagataaccaagagttttgcctgatccagtcttcgcaatagctactacatcttgattttgcatagcaattggccatgactgcgcttggataggtgttgggcttgcaaatccagcacgttgtatcttcagaaagtaaaatgggggaatagcaacaaacaagggaaataaagacaatgtaagaattcatataagtggttaaatttgattaaacatatcccctttgaactctttgttgcacaaataaagacaatgcatgaggacaatttaaggccatacaaataaaatgttcccgcaatgtgtagacttgcgcacacaaggcgaagtagaaaaagctctaacagagtccatggaggctcactcaggcatagaccgttgatccacaaggccccttccagca

SEQ ID NO: 9375 - DNA, 751 bp, Zea mays
tgcagcagaatggcggttcagctaaacccatggtaatgtttggctctgatggaactgggagcttgacatctccagcaaacccattggtaagcacacacatttgtgtattttgagatacatatctttttgtttagtcaaatttgcttatgatgatatcataacagaacagaaccctttttcttttcaggatgatgtggaccgtttgctggaagatggctcattggatgataatgttgaatcttttctatcacaggatgacatggatcctagggacaacttggggcgatgcatggatgctagcaaaggtgtggttttgtttccttgtacctgttttgattttgacttgtccttgtgagtgcacgtttttatccatgacatagctaatagctattttgttttatgcctgctgtaaataaatcaatatttaactttctttttaagaaaaaatcttgcttttttttgctttgagaaatgtttgacattcatctgttcactggttagatgagaaatatttccttatcagattactattcctaattatttactgtattattatctttgctgcttgtaaatttacataattatttcaaaggatgctaaataaaggcaaaatgtaagaaaacatagtcgttatactatttttgtttgtgttcaatgcatagctgaagagttgtttgttctaggttttggtttttctgaggttgccaaagcacgtgcaagtgcagccaaagttgtctgttgccacttctca

SEQ ID NO: 9376 - DNA, 764 bp, Zea mays
tgcaactctccgaggctgagtgatgccaatgactttaccatcctgacaaagcccaccatcatacaaaaattgtggaagctctgcatgaccaaaataaagaaaatattgattcttcgaagaaccaaagtagaaaaaaagatatatgtttctgcaattacaaatgaatatgtaaacaaacggattcataacatgctgtttctgaaacaatctgtacaaaacctaagaataactttcctaagaaaccaatcccacattctcacttggaacgatattacaatgaggttacagtgggaagagtccatttcacttctacagtagccctttcattaatattgtaacgcgatcgcgattgaatacgaatgtttccgaacccacagacaaaagcagtccacagcacccacttccactaatttacgcccaaaaggccaaaacatttacatcctaatcagggtctaatcacataataacaaccaaaagtttcggaaagcagcatgcttctatcaattacttcatctaaaacaacaactgtgaaaagggggacacagaaacagacttacgagtagttttgccactcccagtctcaccaacaattatcagtgtgtcgttattcctcacctcctcaactagccttttctccactgaacaaacaacaaacaacaaaattctgctccctgagctaagatcccaaaaggtatcaaagacatataaaagctcttcaggcaaacctgatgcaatggggagcgacttgcgctgttgtcgaatca

SEQ ID NO: 9377 - DNA, 783 bp, Zea mays
caattcgagctcggtacccttgaacgttttatattacaatgaagtctttgtgaattcccatagggtgttcttatcagttttttctttaaaacctcaatgtgttccgatgcagctaaggagagagagaattgcagaaaggatgagggcattgcaggaattggtccccaacacaaacaaggtaataattcatgccacaattccagatgtcatacttgcgcgtttgacatgcctgccaatctgccatggaattttcagcaagtggtccaggcttatgatgccctgacagtagggcttatcaaagtgcgcctagttctttttgtcttaggaacatgattatttgcgtagatggtaattcttgttccttgataagtacataaccgtgtttcaccaaccgtgttttgcatatcgcttgaaatgatatgaatcccacttttcgttcattcgaataattatgcggttattgtgaacgataaatgatatcctattaactggatagtgagctatgatctgttatttcggaaaaaaaagttgagatagcaaacttgatgcattgcttcaaactgtgcagacagatagggcagctatgctagatgagatccttgattatgtgaagtttcttaggcttcaagtaaaggtatgcttttttttaagcgcaatgttgcctttaatactgtaagcaacagtgaacgcccaatgtcttatatcgatttaaatacggatcgctgtacttaaatttcaggttctgagtatgagcagactgggtggtgctggcgcagttgcgca

SEQ ID NO: 9378 - DNA, 767 bp, Zea mays
tggaaggagggcttggcgcctgcatatattaacggaaaaaaaaactgtgatgccttcaaagttgaaactatatgatgatgattgatgaaaatatataaagaatacacacaagatggagcaagaacctaacacaaaggacttaatatgcatgcttattaaaacgacgtttaaacgtcgtttaaactataaaacgctggaagaaaccaaaatggtgaaacgttttacgattctttgtaacgtcacgttttggcgtttaaacgctgtatagcgtgaaacgccacgtttcgagcgtttaacggcccagctcaatttcccgcccaggtctagggttttcgctcaccagagccactctccagacactccaggaagtctaggccgccgctccgctccaggccgcgacactccaggccaccgctctgccccaggccgccgctctgctccaggccaccgttatgctccaggccgctctaggccgccgctcctcccccgtgcagcttcctccaggccgccgctcagccgcgctccagagtccagccgctcccgctgtccgccggccactacagagaccgccctctagctttccttcactggtgagtaatggcagagaccgtcctctagctgttcagcctgattaatccaaatctaccatcttaatttgctgaatgaagaaggattgaggtgaggtgctgtcatctgaacatatgcattacattattgcagaatagattggaggagaaatagctgattttagcaaggaagcatctgca

SEQ ID NO: 9379 - DNA, 782 bp, Zea mays
tgtggaaaggagcctagctgatctgtacagcagtgcgtctgcggtctcttcgtcagccatggatgccctggccttcctcaggatctccgcggcttccttgacgtttcggctaaactcctcgccatctgaatcagcagcactggcggcgctttcatcgtcaccatatacaggaggatgcgcttcgctcatcacaccgatcttgagcctgtaggacctgtcccggatttcaagcgtcctctccagcaaagatgatgactcgtcggaaaacctgccttcaaacggggggccatcagggtcacgccgatgcctgtgcttggacaccagtctctccagcgtggcctgagcaccggtccctgcatccttggatccattgtcatcctcgtcaaactgcaacatgccaagcggccttccatttgcatcatcgactgcagatggatcaaatgcaaaaggctcctgttgcagagtagagtccacgggtttattgctcccaatttcctgttgctgttgagcagcccggttgttgggattggccgcggcttgaacatctgaactgttgttgccttttgcaggcttcttccttggcgggctgaggctgaggtcccgcacggcgtggcgagcccaggcaccgagatagtcggcgacctccccgagcggtccgagcgcgtctgacatggtgcggccggtgtcgccctgttcggcggccactgtggcggcgtcggcgacggcatcccgcaggcgatcgacggcctggacgaggagacccgggtgggcgtcggagacca

SEQ ID NO: 9380 - DNA, 821 bp, Zea mays
acgactctagaggatccccctggagctggactggacggcggtaccactgactttcacactgtactgtgcaactgcatggacccagctcctctgatcctctctcgctctccctctctctctcatccataacgacatggcacctttgcaccacgctactgccctgcctactactagtactgtctctttgaaccactttggtggcctaatcccgggcccctctgatgatggcttatgagccccagctttgcgcttgcaggcactgcacggtctggttcttgttcctgagcagttgagctgcgcacaccgacttcttttgcacaaggtattgtatttgtcttcggtgttgcagacgtgttcttcccacgcatgcttttaatctttttaaaatctccatttgcgtaagctcagtctgcagtttacaaatgctttgagtcctgcgctcctgtcctgctgttcttgtctagcagtaaacaagtcatttcctttgttgtcacatggtggctcgccgagtgctggtgcacacattctctcctcgttccaccttgctgctgctgctgcagttcttggcacggccttgtattgtatgaatatgattgtatcacatgccatgtgactatgtgagtagctgaccacggctcaccgcgaggcgcacaggtacagcagcgcaggcgcggcggcagcccgccgctggatctctcccgaggctccggcgatggagcggtcctgctacttcccgctgcggtgggagagcacgggcgaccagtggtggtacgcgtcgccgatagactgggcggcggccgacggccactacgacatcgtcc

SEQ ID NO: 9381 - DNA, 805 bp, Zea mays
tgcggaggatcgcgctgctgcgccagcgccagcgccagaggttgagtggccggcgcgagcggcccgtgggtgacggggtcgatgcccatcttcttgagcttcttcttgatgtgggtgttccagtggttctttatctcgttgtccgtcctccccggcagccgcgccgcgatcttggaccaccggttgccgagctgcgcgtggaggtcgatgaccagcgcctcttcctcctccgagaggaggccccgcttgaggtccggcctcaggtagttggtccaccgcagccggcagctcttcccgcacctcagcagccctgcgggggaccaagaaactaatgtgaggaaagccatgccgggatgccgccatctgcatgcattcgtgcacgcatatgcaccgcacccgcgagcttggggacgagccgccagcagcaatggccgtgagacaggaggaaggtgaccagcttctggtcctcctccgcggtccacggccccttcttgataccgatcttctcgcagcacggctgcctgcccatctctcacactctcccgccgtggacagagaaccaagagacagagcttgtttaactcgattgcgtgctctcgctctctctctctccggcgatggactcgcactcactcgagtgaaagctgaggtctcgcgcgagctgaagccttaatttgcggaggaggcgcgccgcgcgcagcaggggattaatagacgcggtccgaagtgagaagggccgcgcccacgtggcggggtgagtcgcacgtgtggagctgtctctgactgactgagtggcctcaactca

SEQ ID NO: 9382 - DNA, 829 bp, Zea mays
tgctagggtcaacacccgctctctgcggactgcgtgagcgtgaagcaccagcggcggccaccgggcaggacgagccccctccccaaacagagagggccggggatcagtgcgtgcgctcctggtggagggcgtggaagagcttggcaggcggcaagcaggggtttgggaggatggtttcgctctcgacttggttccgctatgccgcacaaaagttcgagtactgcgtttccctctcgttgaaggtactgcgcctatccatctatccccaattccccagccccatgtttctttctaaatcctactccaccctctctctagatccaaggatcctagtagcagcacatcttgctctgtaattaatggcctctatctacctttgcgtctgtacactcgtcgattctaccacactgttcaatccatttgcccttcaccacaacactgttgtacaatagcttagctggactatatggaaaatttcaccaatcaaataacgctaccgctacacgtgttatgcctgcagcagcgacaactaaagaatagtagcacaacatgggctgaattcttattgtctgctcaggaatagagatccccccattttcacgtcatcatgttataacattttttgttgaactcttttcttatacatgcatttctcttctatgcatccgtatccaagcagaaatataatgatgtgggccggatcagcagcacgcagctaactgatgtgttgaacaaaaatttattccaaggcaagctcacctacgtgtgtccgaccaaaggggaagaagccatggctcccatcgcatctccaagggtaccgagctggaac

SEQ ID NO: 9383 - DNA, 841 bp, Zea mays
tagagcatccccctggcgcctgcgtcgtgcatctacctattgtaggcatcttcacgtccatttacgtgacagcacgcgtacaaaagcgcagcgtcgtacgcgtttttactagcgacaaggctcagagacgtgtgcatgacacgcatcacagtaatgtttgcaaaagaaagcagcaggcaggcgcaggcgcaggccgtcagccatacatgaatgaatggaaacaaattaccaacgtgttgtacaacaagaatgatccgtgcatccataaaacacaaacaggagaacacgtccctgcgtatgaggaacggtatgggcgtgtaacggttaacgcagctctacttaaaacaagacgacgagcccggccgccaccaaggacaccagagcggcgacggcggtgcgcgagcccggcgccgccgactcatcctgggcgagagcgggtccaggcgacagagacgggctcaccgacaccgagctgagcggcgccagcgcgggagacggggtcgggaccggggcctctgttgtgggcgacggggcgggggcttctgtcggcgacggggtcggggcgacgcttggagttggagccggagacacgggggccggcgcgggcgccgtggccggtggggcggcgggaggcatgacgggggcggcgagaagtggcgtcggagccatcgctggagggagcgtggccggggggagcgccgccgctggtggcattgccgtgggcggggaggcgactggaggctgcgtctgcgttaccgatggtggcgtggttggaggggtagcggatgcaggtggcgcagcggcagctagtggcggtgaggaaaccggggccaacgtggca

SEQ ID NO: 9384 - DNA, 823 bp, Zea mays
ccacagaaccggcaggtctcctaggaaatgaaatgccagggcctcgaggcttctttgcataagtacgcccagcatcacttgatgaccttttctcacccttgggcttcagctcagaaacacgcttctggagaggtccaagtgaacactccttctgaagcttatgctcttcgatacacttaatcacagccctcaaagcaattagctccctagatttggggtcatcctgaaaattggattcatcgagtcatgagacaaacttgtaaagttataaaataacaaacaatagaaaaaaaagaattgcaaatcaaatgtaaaactatcatacaacatgatttaatataaggacttatttcacattactaataacattgtggtcaatatcccacaatgcacgagacaattgtgcggtaagccgaagcgcctagcaacagttgcacagtaatattcacagacagcaaacattatatgctgagagcaatatagcatttccctagaaaattctggaggtaaaggtaagataaatttcaagaaattaaagatgggctcccaatggtcaatattatcaaacttaaaaacaattacttagtagtttgaatcattttacagcaaataggaattggtattatccagatttcgttctcttgtaccaagaacagcaagcatggtgaagtggtgactggtgagagctgtctcgctgagtcaccaggtcacaagtttgaagcagcctcttcgcattgcggaaagaagacttgcctcagtttatccatttcccataccccactcatgtggtggcctccgggtctacccttgttctcttgaccag

SEQ ID NO: 9385 - DNA, 789 bp, Zea mays
atcggactcggtacccctgaatgccgacagttccatgacacagcagcttctgtatgagatagttcctgcccacctaaaatctattgaatttgcaccctagcggtatcccattgcctgacagaaacatacagagtgatgcgatcctgaaatcaattcaacttgacactagagtttgtctttgtccccatcctgtggtacagacgcacagtccaaacgctactgtgcagtgtgcaccaaacacacacactgctgggtgctggcagtggcagtacagaaatccaaatcgaccacgtgtaccacgagtccacacaccccttcccatttcctgacgcggacacgtccgcctccctttgccctgacagagaaaggagaggtgggagagggagcgcgcgtcgcagcacgtgtacgggcagctcagcgacgccatggccttcctggaccgcatcttcgccggcgatggggagggatggtccgcgtgcgccagtgcagcctcgtcgcgcgaggacggcggcgtccgccgggggctcgagcagctcatgcgacacttggccgcgtgcggcggcaggaccaggaagcccgccgcctgcccgcgctgcaggcgcgcgctccagctcctccggctccacgcctcagtctgcgaccgcgccggcggcgagccttgcaacgttcccttgtgcaggtaaatgcagtgcagacggattaccacacatcaatgtcgtgtaaaaaaaaagatcccttttcgtttctttttggtgtgcatcacatgtgaacaagctgtagtctcgcgca

SEQ ID NO: 9386 - DNA, 809 bp, Zea mays
ctcggtacccctggttgcttgctcagctcgtcgacgttgagcaggtcgtcgatccgcgcgatgatgttggaggccaggctctccaggaccctcgagtagctctcgaggatcgatttgcccacgtcctgaagagaccacgcatgagcatgacaaaggaaaaaaaaagagaaaatgttcagacgtacggcctaaacatcgatgaacgaagctgctctcgtctcggtgtatcgcgaattgaaccttgttgtactggatcttgctcatgtccaagctcgtctgagtgagcccggggaaccgctgcttgagggacatgagcagcgcctccgcgcgctcggcgagcaggtccctcttctccgtgtccatgaccatgtccttcacgatgccccaggacgatctggcgccgccgccccccttccggcgccacacgtagatggaggcctcgacgcggttggcgatctccagcgcctggtattccgacgacaggtcgaggcagtcgaggaggtagtcctgggagaactggtccgaggtgatgtaccggtagatgacgtcgcccagcgccgcgcgcccgttctgccacacacacacgcacacgtccaaacgtcgtcagcttcaaggtattaattatcaccggcaccggcaccggcacgcgcggcacaggtgttcgacgaccggtcgacagactctgatgaaccgtacctttggcagcgagtcgaggtaggagaccggcacggccatctcggccagtgcgttgctgttgatggccatggcggccttgaggatctggctggcgcagtcgcgacggtgctcca

SEQ ID NO: 9387 - DNA, 832 bp, Zea mays
tgctgcaggtatgcacttcctcgggcgctgacaatgttcatgtggagttgtggactcgtgcatatcttagttaagtaattatcaatttactagcgatatgtttcacaatcacactactattacaaggcttatattagactagtgctatgcgatcagttttaagttataatttttccgcctttttgcctctttggtcaatattttttctttttatttttaacctgattgcttattacttctgtatgttgtttgtttattcataatatgtctttaccaagtagattggacatacatttctgccttgtgtgcttgctgggttaagcaatgctccacaatatgtcatgaggagcggatccttggaccatggttgcatagtggctggtgatgttgacagtgttattcttcccaaggactcctgtggaggagatggtacacttgcttttgctcgagctgcaagaaaggacaaggtataatgcccatattaattagtgatggaagatgaagtatgtatctactttgactgcagagtgtgttagataagttcatcgatgcaagttatgttagcatcatgattggagctaattgcaaaaagtgctagtcataattaaataggtcagctaaattactcatttcttcttttttgcagcccttaatcattaccgtgcaggaaaatgagacagtgcttgatgatactccagacaagttcggcatagaagtggtacacaacatacatctataatcttctttcgtgttttctttgactctttctgataagctcatagatctaataagttattggtaactctgaatgttttctcctcaggggtactag

SEQ ID NO: 9388 - DNA, 841 bp, Zea mays
caacgacccttaggatccccctgattaactaagagaacatggtctaaaaaggtcttgctttctctttttttcttcttctttttggatggaattgcccccaaacttcctctaccatctctgagcagcaagaggaaggcctgtttgtgctcaactatttgtttagaaaccacccagcggcttaactcagagaatattgtttcaaactctctttttctttccattttgaaacgaatggtccatgaactccatctatcatctctggcctgaaaagaaaaacggaaatatggttggagacatgagcaaagctagttaacaagccaatgatgaagagaaatatgcatataggagagagctctcacagggagatatcagcaaagcaaggacaaaaggacaagctttcagagctcgatcaatctattcacccaaaacgacattctccaagtactcaattgcatggtgcatgtgaccttcatcaaatcccttgaacaaggccttacgtgttacataatctggatgaataccgttctgatgcatttcaaaatagaatctcatcgcatcttcccagttgccctcttcacagttcccatctatcaacaaagtatatgtgtatttatttggcaccaatcccctttctagcatctcataaaaatgacgataagccagttgagttctgcccatcctgcataatgcatgtatgaggacattatatgttatttcattaggttcaactccttcctccagcatctttcgaaaccaaccatatgctgaataaaggtttcctcttctacaatatgcatgaataataacagtgtaggtcacaggggtaccgagctagaattcg

SEQ ID NO: 9389 - DNA, 834 bp, Zea mays
tgctgcagggcggcgacgcgtccgagcactcgttcggcgggatgtcgggcacgcccgccgcgacgcccgagaactcctccgcgtccttcggggacgacgaggtcggcgtcggctcgccgcgcgccgggaacgccggcggcgacgagttcgacgaggacgagcctgattccaagagatggtgagtgctttggtgatagatacagatgcagtaccttttttttgtttttttgcgccaagttgtttctgtcgcatccttggaagaacgaacaagcggaattgaattcctgttgcttctgtcaggaggaaagacggcggtgacggcgagggtatctccatggccggcaaccggacggtgcgtgagccgagggtcgttgtccagaccatgagcgatatcgacatcctcgacgacggctatcggtggaggaagtacgggcagaaggtggtgaagggaaatccaaacccaaggtaattaagatttccccgtctcggtggaacaaacaaagcactccgtaaaagcatatcgcaagcgtcagcttttgctcatcgtgaacgttgtcttgtggctgcaggagctactacaagtgcacgacggtcgggtgccccgtgcgcaagcacgtggagcgcgcgtcccacgacctgcgcgccgtgatcaccacgtacgagggcaagcacaaccacgacgtgcccgccgcgcggggcagcgccgcgctctaccggcccgcgccgccgaccgcggacaccgccggccaccactacctcgccgcggctcggccgggcgtggcctaccagacggggcagcagtacgggatcggtgaacagggtaccagcagagtg

SEQ ID NO: 9390 - DNA, 752 bp, Zea mays
tgccacaagggaatctgtaagcgtagacttgcctgcaaagaagtaataatagcatcaggtacaagatgacaaaaagataagcctagagaacatcaccagcaacttcaacatgtgcgtcatagagcattaaagtattaagggacagacaaccaaatcaaaagataacaaaaacattaatagattacaatctagagtatacagttaacagatacttcatacacaacaatgcctagagaaccagtatattaggtacaagatgacaaaaggataagcccatttcctacatgggtcaaatatctaaacttacgtagttaagtaggcctaaaataaaatttgcagcaagaaaagaaacaatagctgtaaatacaatgcttaaatattgaaaacacagaagttaataacacactagtacattacaatataaagtagaatgaaccaataacacaacacctagataaaaccaatacattaactacaagacgaaaaaaataagcctatttcatacatgggatatattgactatagtagacaatgcagcatgaatagaagtattagcagtcaggtacagtacagactacagagctcaaatattggagcaaattaagtctacacataaaaaggcttgaaaacgttaagcaatgcatgtatatatatatgctacagagcagtgttctgaacataccatggtccacatgagcaatgacagacatgttacgaatgttgttctttttgtccatgatggcacggagctc

SEQ ID NO: 9391 - DNA, 791 bp, Zea mays
tgctagtagcttaattgtgcaatgcaaacgaacttgttcccatgcatgcaacgtctctagagtctagaaggtgaatgccctcagcgatgacataagaggagaaaaaacgagttgggtatacgtctagggaacttggatacacatacacgtacacatacacccctcgcaaaattcctgaaatggtaaaaaaaaaagcgggcatgtacgctggctcgctgccacttgtacgtcacttagggcatgtacaacctagatacagctgcacggtactccaagtataagacacagctaaaacacaacataatacagtggtcatgtctaaaacatgtgtcttaccatattcattgtaccaatcaaaacattcaataaattaaagtgaccaatcagatagtctcctgtctcgaatatagagctaagacactgtgtcttcgtcaagatacatgtcttgagattttttacattcatccccctagacacactctaagacacaacttaagacacccactgtgcatgcccttacattgcttgcatgagacgacgaaaaagattagaggatccggaagaagcagagagggggcatcttcagggaacacgtggcgcgagccagcaggggcagaagatatttcagtttccacgccccgtgaacaacgcacggcgcgcgcgcggtacaccgcctcagaaacattcagaactcagaaggatcgtcaggcggaagctgaagctggagacaaacggtggtctaattgtactgcacaggccggcttgcgcgaattggtaactaggccctcaca

SEQ ID NO: 9392 - DNA, 770 bp, Zea mays
catactcctctcagttctctgtattccctcctcaaaataaaccatcctaatccaacaaacactacctctgccagaaatattgctgacaagaatccatagaagtacagatactttgatccactatgatctctcttaagcttatccagaaaatctgctatgaagtatctatttgttgtaccacagtcaggactatacttgggaccaaaaggttgtgattgcggaattgaggcatccaacacttgtaatccattaggaatcttgatgtacatggtaccagtactaacaaagttctgcagggttacaccgccaacaagaacagacttcggatagcaatcaccaatcccttcccagtatgcaaaacccttgcagttgcaatcatgcaggcactccttcttgcaaaagtcaagagaaacggagtgatgggcagtcatatcataccccaagaaatcagtgtggggtagcttagcaaaatccaccttctccacatcacaactgatgttggtctttggtctgcagcctttgctccgctcacttgggtcgatgacttcaaaaccaggggcacacgcacaagcaggcacaggcgtatacacacaaattccgttttcgccacacagaccgtgtacattgcaaagctgaggaaacgccatccatgtgaccgaccatgttctgtctgccacattaagactgtacaatctgaggttgccatcgtaatccagtgttagccgcctcatgataccagggccccagtcagcagggtaccgagctcgaat

SEQ ID NO: 9393 - DNA, 798 bp, Zea mays
tgttttcaagatgacagatctggggttactgaaatattatctgggaattgaagtaaggcaaaataaggagggaatatctctcagccaaggagcctatgcagaaaaaattctggagaagaatggaatgagagaatgcaacccgtgtcagactcccatggagacacggttgaagctgagcaaactgagcactgaacccctagtggatgtcacggtataccgaagcatagtaggaagcttgaggtatttggtcaacactcgacctgaccttgcgtttgctgtgggatatgtcagccggtttctggaagaaccccacaaagatcacatgatggctgtgaaacacattctgaggtatgtgaagggaaccaagaattggggtttgtggtttggaagaaaaggaaggaatgaggctgggctgattgggtatagtgatagtgattatgctggggatgttgacaacaggaagagcactactggagtggttttcttcctgaacaatagtccagttacttggacttcgatgaaacaaaaggtggtggctcaatcaacctgtgaagcagaatatatagctgctgccaatgcggcttgtcaggcattatggctgagtagggtactggccgaagtacaaggagtatcactgaaagctccaatgctaaaagtggacaacaaatcagctattgccctcattaagaacccagtgctacatggtcagagcaagcacatagaagtgaagtatcattttgttcgggagtgtgctgagaatgggcagatcaaagtggacttcatcaggagcgaagaaca

SEQ ID NO: 9394 - DNA, 775 bp, Zea mays
tgcttggattgcatgtagatcacggtctttctctacgtgcgtccagagacgatgggacaatgggtgcctcgtggtcctcgggcataggtcctggacatcaaacccgccggagcggccaatggctgaatgccgctgatacggcgagtcaccagacgatgcatgcaccctgctcctggggtgccgacaggcccccacactgacactatcgtcgtccccccctcgctcgtgctcgagctgcgccgcgccaactcatccgccaccgatctctcggttgcattgcattgcattgcatgcgcgttccagtgtttccaaagacgcttgtgaacgcatgtaataaaagtggtttgggtcgctatacgctccccactagcccaacaccagcaggcagcagccaaccaaccaaccaaccacggcatctccatttacaacaaacaggccacaggcacggcagcaagcaaaagtgggagggggtaatagatgggagcgtctgcgtctcctcctcctccccgacgcgctgtggcagcgtccgtgcatgacaacttgacaagcagcacgcttgcactgcatgcccactggctgacggctgaccggaccagccggagcccggaagcgtagcgtgcgccgtgcagactgcagtgaaaggcatgcatgcgcgctgcaggaggcagcggcagcaagtgaccggtcctgatgcctgatccgtgccagagggggggggggagagggagaggtgactggcagtcacagcctgaccagccagccagcgggcgcggca

SEQ ID NO: 9395 - DNA, 984 bp, Zea mays
gtcgccaccgactccagggcggtcagtagtacttgaaagctagctagctactttatcagcttcttgcttgctttgcctctcgatctccctcctaacgaccacgttgttcttggtgtggctttgattttgttttggctgctgcaggtgggtgagttggccgggttagcagtcgggtccgcggtttgcattacttccatcttcgcagggtaataataaatacgcatcacttaaatccccagatgacacacacacacacacacacatcttgttaattattaagctaagaccgagtggcatttgcaggccggtgtcgggcggatcgatgaacccggcgcggacgctggcgccggcggtggccagcaacgtcttcacgggcctctggatctacttcctcggccccgtcatcggcacgctctccggggcgtgggtctacacctacatccgcttcgaggaggcccccgccgccaaggacacgcagaggctctcctccttcaagctccgccgcatgcagagccagctcgccgccgacgagttcgacaccgtctaaattaaaacgcccacacgcgcatccacaacactgtcagcctgcaggtcaactcttcgcgcgtacgtacgctggacgctggctgagagagtgagtgagagagagagagagtactgtactactgtgtgctcgctcgctcgctctgttcaaagacccttatcattattcagtggggatcctagagaagattagaacttgcgtgtaatgtattgtggtgagtggtgtaaccggctttgggatgaccccttaccctaaccggggtgaagagcagcctatgcgccggattgttttaatgtattactttcactccaggggtttgccaaacagtttaaaattttctttttccacggggggtcccgcagacttcgaaatatctttaatactttgctgtatctaactttttctcctgtgggagaaaaattggtatatctcctaacaca

SEQ ID NO: 9396 - DNA, 868 bp, Zea mays
tgcatatcaattaactgtttgcaacactgacgaagatacataaacatcacgctagctgctctcacccgctaggtagggtacaccaagcacgtacacacacacacatacatacacgcagctctatctctctagctcccacctgatatgatgaggtctttgaacagagcgagcgagcgagcacacagtagtacagtactctctctctctctcactcactctctcagccagcgtccagcgtacgtacgcgcgaagagttgacctgcaggctgacagtgttgtggatgcgcgtgtgggcgttttaatttagacggtgtcgaactcgtcggcggcgagctggctctgcatgcggcggagcttgaaggaggagagcctctgcgtgtccttggcggcgggggcctcctcgaagcggatgtaggtgtagacccacgccccggagagcgtgccgatgacggggccgaggaagtagatccagaggcccgtgaagacgttgctggccaccgccggcgccagcgtccgcgccgggttcatcgatccgcccgacaccggcctgcaaatgccactcggtcttagcttaataattaacaagatgtgagtgtgtgtgtgtgtgtcatctggggattaagtgatgcgtatttattattaccctgcgaagatggaagtaatgcaaaccgcggacccgactgctaacccggccaactcacccacctgcagcagccaaaacaaaatcaaagccacaccaagaacaacgtggttaggagggagatcgagaggcaaagcaagcaagaagctaataaagtaggtagctagctttcaagtactactgaccgccctggagtcggtggcgacggcgcagggggatcctctagag

SEQ ID NO: 9397 - DNA, 772 bp, Zea mays
tgcgacaggccccgctccttgcccgtggcgcgccgggccagcggcaccagcgccttgtcgtagatgggtatgcagaccatgacgctgatgacgtcgaaggtggagagggacgccggcggcacggtgaacggccccacgcggttgtccatggtctcgccttgctcgatgaaggtggacgacatctgcgcggtggccgcgaagaagagcaccatcgacacccacacggggaacatccgcagcaccgtcttcagctcctcgacctgggagaccgtgcagagccgccatgggcttgccgtcgctcctttctcgccggaggatggcgctacaatggcagccttgtcaaggaacctggatcaaagaatctcaagatgtgtacgtatttggagggggggtatcctgacgtatttggaattggatgatggatgatgtacggaatacctgaattgactcgtatgctgcatcgtggaatcatttccttccgtcgttccgggaggcgcctgatgcagcagggccgccgagctgtcgtcaggctcaggcagcaccaaacggtagttcctgacagcagcaaccaccacctgcgaggctcttgtcagagggctccctcccactctctggtacctgtaaaccttcctaccggcgacgaacaccacgagtcccgacagcatgagcagggtcgggatcgcgaacccgactccccacccaacgttgtcctgcacccagacgaccaccgtcgcggacagcagggagccgatgttgatggagaagtagacca

SEQ ID NO: 9398 - DNA, 812 bp, Zea mays
tgtaagctatttctcatttcacttaagctttttttagttccgtgtaaggtcctgttttaatgcttgcttttttttgtttaggtttttgtgaatgcacgtcttcatgtgtccggaggtgctcttggaggtgggcggatggtggaagactcctcaagtgttgcaggttctggttttaagatctttgtttaatacgttttgaaaagtgtcctatgttgccattaattcacagagtcattgaatgattccatgggttccaacttccaagctcaattaagttttagtactgcatcagttcattcttttccaaacacacaatacatgttctgttaagtgtttatatctatttctgtcaacatatatgcgttgcagatctacctgaatactataaactctgtttactttcaacatttttcattcataagacatttgctaatgatatatcaacatgatgtactgtactctttcctgtcaacatatatgctgtgctgatataaactggtcgcccctttttttcctagcatttgaattgtcttgcgcccatgtcttgtttggtatatgtatccacattgcaattaccgcaggttaacacctctgtggcaacctatggttgatattaatcttttctttctagtaagtttgtgttgttcaacttgtttcagtactggacactgctgctggagtctggtgtgacacaaaatctgttgttacaactcctaggacaggaagatttagtgcagatgcagcagggggtgatgctgctgttgagcttacacgacggtgcaggcatgcagcaggaggatcctcaggagtcg

SEQ ID NO: 9399 - DNA, 827 bp, Zea mays
tgctgcacggtcttgcccaggatctgggcgaagaagtcgtcggtgtagccgtccttcatcttggcgttgagcagcgcgacgaagcccggcttgagcgagtcgcagtagtccaggaacctcgccgtgacgtcgtacccctggtcccaccggtccccctgccccggctgcacccagtggcccggcgcgtaccccgccttcagccggacgtagtcggcgatgccctcgatgaggccgccgttcgcctggccctgcccgtcccactgccacacgtgcgttgtctcgtggtacagcacgccggtgacctgttcgacgaacggcacggcgcagtggcgcacgaagatgttcgtttagaaacagagacgcctcgatcgtgtgttatgataaggtggcaagagtgtgatgtatttacttcggtcttgacgtcgccggagtagccgccgacgtactgcgcgctgaggtggatcccgttggcgctcgtgaaggccacgccgccgatgtcctcgacgacgagggtcaccgcgtcgacgggcttgcggtcggcggggctgggctggtcgaaggtgttccagatgaacgtggacgcgtcggccaggacctgcttggcgtagtcgaggccgacggcctggtcgaaccgctgcccgccgggggtatcggacgccgtgttcgtcgcgtcgaacgtcacggcgccggccgtcgatgatgcggctagcagcgccaggagggcagccaccgccgcggcgacctgacgcttgttcatgatattgtgctggactgctggctgattggtgcttgccttcttgctcagctcagggtaccgagctcgaatt

SEQ ID NO: 9400 - DNA, 761 bp, Zea mays
tgtggaaatatagcagcctcagcaacaaataaaaaagttaaaataactgccaaagaagttgagaattcggaagtttgagctaaccagagcagaagaagccatgatcttcctcgcacaaaccaccaagatcattaccatcagggatctgcttgtcaaatcggactccaatttttgaggatccattatcttcaaaagcaagcatcactctgcctcgataaccataacttggtcccctggagatcaagcaagcaatttatataaacaaatatatgtattggactaatataatatggtgctagaaaaaatgtgatatggggaaagaatatctgatttcacaggatagtcgatacaaaagcaagctcataactgggttgcctatgagaagtctcataaactggttattcctcttactataaaacatgatacctaaattctgatgataacaatgttgatacctaaggaacaagcattggataaatctgaagacaagaataatatttgcaattaaagtacctttgtgacaatgaggatagctgagctggacccacgtaacgcaccctatcacctacagaagatgtggaagcgaaatcgtgtttagaaaaacataactcaatagattgagtaataaagaaaagctaacaaaaccttctctgaaagtatagctcttggatgtagctgttgaggattcttgtttcggtagagatgcagactgcagagtggatgttcccacaatatcagcattcacactggaagttggagca

SEQ ID NO: 9401 - DNA, 746 bp, Zea mays
aatagataaataattttgttacaggtgatacacatgaaattcattagtgggtttcaatttcaactcgagttgtcccaaacaagggaaaaaataatagccaaaaatttctctcatcattttttcaattatatctaaccacaagtctggcctttgtttggcagctcagtgatcttatagaagagcactacatttgttttgtgcatgtcaatggtacgtgaagtctttgtcagtggcttttcaccatccattccatttctctgtttttcgtgcatttacacatcagtaaggagctaaatcgggttgtaggaacactttatgagcttgatggaatgaaggatggacctataaatcacggaccctgttcttctataagtttgctgcaggtactgcaaggttctgaagtggttcctttttttcttcttgttttgcacatccttttccacttccttaaaccggttgctgaaactgctaacagtaaagctcaaagaaaacgactgatgcttattagaattttcagttataatatagcctacagtaaccattttattgcaccaggatgttgttcctgttattaaggccatcatgtgcaatatccctaactcaatcaacttcaatcttatggcgctgtcagggaaagaaaaataatgctggtgctattccttgagctggtaagcggtggaatgcaaaatgcaagggttcaagggaaggggattaaacggatgcctgtttggactgcaggggtaccg

SEQ ID NO: 9402 - DNA, 1828 bp, Zea mays
gactctagaggatccccctgcgacccaccaagcaaccctgcttcggtggacgctttcataaaggcatttccaaaccctccggggtatcatatgcggtcaccctgggaccggctgacggtcgtctcgacctacgggcccctgggttccgaggaagatgacgagcccgactctggttgggatttctccgggctcgataaccccaatgccatgcgggacttcatgaccgcatgtgactactgcctctccgattgctccgatagcagccatagcctcggcgacgaggattgtggcccaagtcacgaatgcttccacggcgatctagggggtcccgacgaaggcaaccatcttggtatgccggaggacggtgatccccctaggcctgtgcctcgcgttgacatcctttgggagctagttgtggtcccagtccctgcggggggtcaggacacacagctcgagcaaatctgcgaggtacaggccaggctcgatgaggaagcaggacaacttgggcagcttcggcaaaatatcgggcaggagtgggcaggccgagcaccggccagagaagtgcgtcatctaccccagaacgtctagcaccgcatcaccgacgatgccagggcaaggctacccccggcttccagtggggtcggccagaacctggctgcagcggcaatactactccgagcgatgccggagccatcaaccaccgaggggcggcgtatccagggagagctcaagaatctcctggaggatgccgcggtccaacgggccgaaagctctgcctcccgaaggcaggggtaccccccggagcatcgcgccgcgacttcccgattcatgcgggaagcctcggtccacaccgggcgcacgcgcaacacagcgcctgcggccccgggttgccttggcaacgagcaccatcaccgcaatcgtcgagcccacctcgacgagaaggtgcaccgaggctaccaccccaggtgtgggggacgctacgacagcggggaggatcggagcccctcgcccgaaccacccggtccgcaagctttcagccgggccatacgacgggcgtcgttcctgacccggttccgagccctgactaccatcaccaagtactcgggggaaacaaggctggaactgtggcttgcggactaccggctggcctgccagctaggtggtacggatgatgacaaactcatcatccgcaacctacccctgttactctccgacgccgcccgagcctagctagagcatctgcctcctgcacagatctccaactgggacaacctggccaaagccctcgctggaaacttctagggcacatacgcgcgccctgggaactcttgagatctccgaagctgtcgccagcagccaggagaatccctgcgggactacatccggcggttttcgaagcagcgcactgagctgcccaacatcactgactcagatgtcatcggccgcattcctagccggcacctcttgccgtgacctggtgagcaagctgggtcgcaagactcccaccagggtgagcgagttgatggatatcgccaccaagatcgccgctggtcaggaggcggtcgatgccatcttccggaaggacatgcagcctcagggacgccatcaagaagacgtccccgaggcatccgcccagtgcggcacgaagaaaaaggccaagaagaagtcgcaagcgaaacgcgacgccgtcgacgcagatcttgtcgatgtcgccgagcacaagaaccttcagaagccctccggaggggccaacttgctcgacaagatgctcaaggagtcgtgcccctataccaaggtaccgtaagcacacccttgaggatgcgtatgc

SEQ ID NO: 9403 - DNA, 744 bp, Zea mays
ggaaaagagccacatcgtcagcatacatagaggcccggtgaagcttttttctcactgatagctgctgtaataaacccgcctcctcagccttaatgaacagagcaccactattttctattcctattaacatggaaaactacttgtgttacagaactagaacagaggaagatctaactttgaataaagttagggtgttatggacctgatatacctgtgtctgtgtctgtgtcagataactagaactttcctataacgagtcagagaagccaccacagctaaccagaaagcatatttttacataccaggccagatcatttgtgtgctacaaccagcttgcttcagaatttattaacgttgtattcctgttcttaactagcttcagcaaaacttgccctaattgactgctcttccatgctgacagaaatattgcggaggacgcggtcaatattacataaactgaaggaacagatcagtgacggtactccagttattggagctggtgctggcacaggcatatctgcaaagttcgaagaagctggtggggttgatcttatagtgctgtacaactctggacggtttcgaatggctggaaggggctcactagctgggctcttgccctttggtgatgcaaatgacattgtacttcaaatggccaacgaagtgttgcctgtaagtagctcagaatccaacatcactctgatgtctttcaactttattgtgcacaaccattgatgtagatctaac

SEQ ID NO: 9404 - DNA, 752 bp, Zea mays
gcggttgactctagaggatccccctgctggttcaggtcatagccaaatctttgccaagattggttggacgacgtgaacttgcatccgtgatcctcaaggcattatccattatttgctcagccacctttgcagaagtaataccattaaggcatttggaacgcacattcttctcactttcacttggagcacctgcatgcaatgaaataacaaattactgctacatgtgcacaatagaatagcacacactaacttaccggcaacagagcataagttaacataaaatcatgtgaccaggtttgaattctttaccatcgctatcttttgacgcatccacttttgtgtttactccatcattagacttattttgtagttcaatttttttggatgagccagccatttcatctctacgaatatctggtaacgtctcagcactcttaatttcagtctcccttttgttaccaaagctctagtcaagacaaaacagtctccataacgtaacatggcaaagaaatccaatatgaatgttatatcagaaccgcataaaggatgaaatgatgaactctaactgattccattaaacagtgccagttacactcactatgttaaagtcaagaaaaagaaccatcatagaaaaggacatgtctataaatgctatagtgctatactgccaaacttcattactttctattaaactggtgttgtcaagctaagcagggatgcaaatgtgaaacttaacacatgcattaatgcca

SEQ ID NO: 9405 - DNA, 783 bp, Zea mays
tgcatatacattaataaaaacatgtccgttcatgtcaagaaaaatatctacctaatattaaagaataaaaagtgtttctttcaacccacttttttattcccaaaataaccccaccaccacctaccggtccctctcatgctgatcgtcatagcccaaaacagacttcgtccgtagacttgtcttgctcttgtaagttgcacatattgtcatgtccgactctaattaaataaacaatttgctttcctgcttgaagatgaacgtgtcacatctagactcaacaaacatcatagacgtttctttctttattggtgcttattgactcggtcacgtaaacttctcctgtgtatactaaaccttcctttctctcctcttgtttgtggtttccatgtatcttcctgatgtcatcatctgtcatactgaacagaaaaaaggcacaatggtttgcattggctacaatcatgtgtgcatgatataaaatatatagaaggaatgtgaagggagagaagattgaattggtcagcatgcagatcgctcagaacagcggggcaagatggcagcggcgatcgacgtgatcggccatggcgatgctctgccgcagccacaggttgagagagggatggacggattcgcgacagtgagtgaccatcgtccctaacccggtaactcctgttcatcctagcttgcaactaatcaatctaatgtgtctatttgtttcaaaaaaactattaatttgtcccaattaaccagaatgcatgtatggtgcaggcatgttgacgtttctca

SEQ ID NO: 9406 - DNA, 768 bp, Zea mays
tgttgtgatggagcgagcatctccaaacgctagcttccatgtcagttctggtctgagagcagtccagctttgccctaagaatgagtgtttcttatgatcgtcagattaaagagggcacatggatggtgtcagacgcatccaaatcatctaaacttgaacttgaggtccatttgccttttggtctttgattgcagggatgcgcacagcattttaaccaagcaaggaagcacatcatccacatctccactggcatgcaaagatcatgcaaggagtcatcatgagttcatggtaatagaacttcacagcagtacagaatgtaattaccacaggtaccaccgtaccaatgtattaggcccgctcctctgatcttgatcttatgaacctccgacgactccttggtctctgaacttcatccacagcatccacttcatcctcctccccttcgttatcgtcgtcgtcatcatcatcatcatattggagacctaacaaattctctccccacagatagcgtctcctctgccttctcaggccccttgatgtgcctcttggctcatcacctgatctaatcggactactgctgagcatatgaaatagaaagaatgttgtcagaagagacccacttggttcactggtttcccggtcatgtgaaaatatttctccgccttcaatagcataatcaccaagcacaactgccccaggcatagcggaccttattgcgcttactatgtcagcataatcccgctgatgctccagggggatcctctagag

SEQ ID NO: 9407 - DNA, 814 bp, Zea mays
tgctgccatccccgctctccagtgccagtgggcaactgggcggtgcagcacttgctgcagtcaactgtggcacagccggtctggaaggagaccgcagcaatagtcgattcgagggcatatagcagtgaagaaaaagcaggagggagaagttttgggtggtggccatgcatctggataatgggagaagcaaggtgcgccaagggagagagcattcacacaagagacagaggacgagcagtggcgctgggaatctgggtccccattaaatgtatccatgtaggttacccaggggagggtacatgggctggctgatgggctgggccagctccttcttactcctcccttctccttttttcttttttccctttttcctcagccacatgttagaatttgtatggcactatggtgtagcctttcctcgccttatcaccgcctaggcatcacatagacatttgctaagtgtttggttcgccgaaatgtaatgtaaatggattacacgaggtaatggataccgatacttatgtttggttgagttctttctagtaatactaggtactaatatccaatccaattataactagtgaccattaccgccggtaagggatcccattaccattcccttaacaatatatgaaccaaacatcaccttggaagaagctggctcgctacaactcagccatagcaccttaagaaccatgattaaaattcctctaaagtaaaacacattactccatagaaaaactagaaaagatgaatttatataaggttttaaaagaagagagaacaaagaccacaacacaacagggtacgagca

SEQ ID NO: 9408 - DNA, 821 bp, Zea mays
tgctgttcgaactactgcagctctaatatatagagacaaaatattgtagaatattatagagggcaacatcagccggataaaagtcacaacaaacatggtgcgaaactggcagtgggcgaggcagcacgtttttttttaaaaaaaaaacaatagcggcgctgctgcgctggcggaggaatcgagcggtcatgaaacggccagggccagccatacacgaacgtgatgtgacgaacaaatcctatagctgcacgcggtgctttcgaatcccgggaccagagatgcagtttagctcaaacagtccttctcaacgcaacaccatatcagtcaggacaaacgacagcgctcgatgaaacctgagcgccgctggaccgaaagcgctaaaaatacgagcggcatcatcataaacatcacacacacacaggtctcatagccgaccagtttcgatgctgccgtgcagtcgatattcgctcgttgttctctgccaaaccccgaatcaaataattttatacacagcaattggagaggcagcctcgtctgatcacaagaacggtggcatcctctgtgaagtgggcacaggcggctggtatccgttctcggggcgactctgcggcatccgctccccagcaggccttctggtaaagcttccatgcgtatggttctgcatgggattgaaggtgccccattcagcaggggtccaagggaacagatcatatccctcccggccccatgtgtacgctcggtcgatgccctcggcatcagaaacgctcctgttcacggctccaggagcgggaaacccgtggccaaggggccctgcaatctca

SEQ ID NO: 9409 - DNA, 824 bp, Zea mays
ggggtaccccttgaaagcatgtgtatgagcagttgtaatggtgtattgttcaggtgaaattgtgaatcatattgcatggtgctgtagtaacacacccaggttagttggttattgtttaactaatagataagctgctcgagagtcagagaaatgtttgtcagggataagagataaaaacaagatctggtttaaagattttattaggaagcaaccatacagtagatgagggaaggtggtctgatgttataagtacagaatgagttagactttttgagacatatttcattcaaaaggaaactttttgagacctaaattctaaaccaccctaatctggtatcacccatcctaattcctaaaccaccttcagtaatcaccgttcagccctcttcagtgtagtcattacactaatgatttaagaatcacgaactttgttttgatgagttgcagtacattatctactggtccaaattagggcacataatatttatgctcacaaagaaaaacatgtttccctcataagaagcaccaaacctgcaaaacaggaagtgaagcaactgttctctttgcttggccattcttcataaaatgtgattcatcagctataacaatctggatgaaaatcatttgaaagaggttacagctatttggtggttaaattcattgcaatcagaagatggatagctgttacattcatgcaaaatggaagatgtcagaatatcattgtatttctaaaaagtcggatattttctatcaaatgcagttgatccttttttctgaaggtttagttcaaatcttatttcttcagaaggatctctagagtcatc

SEQ ID NO: 9410 - DNA, 832 bp, Zea mays
ccgtgcgactctagaggatgccccctgccatgaccacatcagttgttgcagctcttcttcactatcttggtgtcgttagcctctcatgtccaggacaatcttctggtgataatacaactacacgagaacttgacttggttcactctattgcccaaagtgcacattgtatagcacaggggaaaattggcagtggttttgatgttagtgctgctgtctatgggagtcaacgctatgtaaggttttctccagaaatactctcctcgtctcaggtaagaaacctcaatggcagatggcttgcacctcatgaattttgtcagtatatctcactacatttgaagagctggtaatttatgactacaatatttacaggctacaggtgggactttcctcccagatgtagtatcagatattgttacacaaaggtgggatcatgagaataaacagttctcattacctcctctgatgacccttgtaagtcgtcaagcctcaatggctgtttcccccaaaatgacaatcaaatcattttacttgttgccaccataactactggtctgctactagtggtgtaggatttacagtttatttactagatactgcagtgctatgatgcttataggctatagacattaggtcatgcctttgctgatagtgttagtatgtgtgatgaaactgctgttataacctcatgtcatatctatctctcacaaccatgctggaaaaaattatatgcatgtgtgatgcatgtcgcctcctgtccatcaccatttgcatcgtagcaatgcgtgtccgtcccactaggcgagcggcttgatggagctagcttttcgaaaca

SEQ ID NO: 9411 - DNA, 778 bp, Zea mays
tgatgaggcagcggtcaaggacatggagtcatgaatctaggcagccatcaccaggagttgtacggacacaacttgcatctggataccccacagcaagctatgagttccgcccagagaaacggctaagggagttaagggaggatccgcagagcatggtgaagcagctattaaccaagtgtgctgaagcattaagtgaggagaggatagaggagttccttaaccttgttcagcaagctcgtggagttgtatcaattactggggagccaatccagcggttaggtgcttacctccttgagggtttggttgctagacatgcaaactcaggtacaaacatatatcgtgccctgaagtgccgtgagccagagagtaatgaactcttgtcttacatgaagattttgtataacatctgtccgtacttgaagtttggctatatggctgccaatggggcaattgcagaggcattaagaaatgaggacaggatccatattattgatttccagattgcccaagggacacagtggataacactgatacaagcgctagctgcaaggcctgggggtccaccacacgtgcggatcactggaatagatgacccagtgtcagagtatgcccgtggtgaaggtctggaccttgtagggaagatgttgaaaagcatgtctgaggaattcaggatacctttggagtttacccctctgcccggtatttatgcaactcaagttacaaaagaaatgctggacattaggtcaggcgaagcacttgctgtcaacttcactctgca

SEQ ID NO: 9412 - DNA, 804 bp, Zea mays
tgcagccaacgccaggggccctgaatggtgccaaagacatctgggcctgccctgccccgcctttcttttcccctctgcttcttccaacctctctcgctctcatcagtatcagggtcgtcctctcgtcttcttccttcctcgggggcgccaagcctttgtggactggcacacggccgcccgcccagggcaagacagagtcgttgcagtgcctcaccccagccagtttcccttgtgctggagctagcgtacccggcctccaccgtacgtcgtaccctagctctcgatcgcatgcaaaaccgggcatgcgtccaatgatcccgagttttcctaatatatatacaagtagatagcatgcatgcatgaagtgtcgtcgtcgggtcgtggatctaacatgcatagatagaacacacgatatgggggtacgtacgtacgtaacgtaagcatgcatgcatgaagaagactacgctgtttgtacgggggtatgatgaacaaacaagccgccgcctctcttgtcattcatccatgcactggcggacacacagtatgcaaacagaggacacgattccataatccatatcagaaagaatagcaacaacatggatcgccagcagcatgatgaacactccgacgatccggccctctaaacaacgacgccatagaatttaataatgcagtgtgcactgctcctaggctcctagtcctaggcagctagctactccaggagagctgtggaaaggaggagctagctagcagctaggcagcttgcatgcatgggcatggcatggagccctgagaggtttgaca

SEQ ID NO: 9413 - DNA, 799 bp, Zea mays
tgaaaagtagccacgcactgcaaatgttctagaccatgttgttgtctctatcattggttcagtgaatatatttagctgctggttttattgagaattgaatcagatcattcacaattagtttgcaaatcgatcatatacatggaatacttggggtactattatggaatgcaggaagtagtcttatcagcagtaacctacatcttcaatcaaaccatatgcacccatgaaatactgatgtttcttggatgtcttataggtgatttgtggtctgggtctgaggggggagcaatcaaagtatggtatgcagaactgattcagaagtcacttgtttcacaaacagaagaaaaacataagacccttttagttgaaagatcatctattgatcttagggacatggtcagtgatggaggggcctgtcctttgcctgctgtagatgtaaaacttctgttgtctgacaattctagatcaaaagtatggagtgctggttacctctcatttgcactctggtacacttcatgtgttcattacttcatttatcttgttgcatttgaatgacatcactccagctatttctatatgtgtaatactgttatctattctgctatgcagggattctcgcactaaaggccttctaaaagtggtaaacattgatggccaagttgatacccgtttcgacatcttatctgctcaggattcatatagctatgagacaaagcaaactctgttctctccgaggaaagagaaagctcgcagtcctgttggtttcttgcagagatcacggaatgctttattgggagca

SEQ ID NO: 9414 - DNA, 783 bp, Zea mays
ctgaggtgactcccacagcagtcctttgttgcaatcgtagccatacccaatcaccaatgttgaattccacctcccgacgccgtttatcctgataactcttcatagttacttgggcttgcactagtcggtccttgatttcagcaagaaattcatccctgtcctgcaactgggagtcaatcgcagccacctttgagtcccctgcttgataggagaccattggaggaggctcccgtccgtagacaactttgaatggagaacatttcagtgccgattgatatgatgaattatagcaaaattctgcccatggtaaccatttcagccatgatttaggacggtccccagctagacagcgcagatacatggtgattattctgttaacaacttctgactgaccatcggtttgtgggtggaatgctgagctcatttgtaacttcactccagccatggtaaatagttcagtccagaactggctagtgaaaactgtgtcccgatcactgactatcgagcatggcagaccatgaagtttgacaatttcgtcaaagaaggcctttgccactgatgctgctgaatatggatggcctaaagtaataaaatgaccatacttagagaaccgatccaccactgttagaactactgacttgccaccaacctttggaaatccttcaataaagtccattgatatatcagcccacaccatacagggaattggcaagggttgaagtaggcccggctgggtgaagatgttgagtcttatgttgttggcaaactgcacagggtaccgag

SEQ ID NO: 9415 - DNA, 824 bp, Zea mays
tgctcactagtatttgataattcagtggctgttctcttattctttgttcacactaatttgttttgccactacgagactgaaggtgctctttttcaagacatcaactactaaaactatttcacatgtcactgttacttggacaccagcatgagtatataaattggcaagtattttggacttaacaaatatcacgtgcaatctgaatcatgtgtggtgagtctaatacggtgaagtgttttagatccaagagtctgggcaaactggttttgtcactattttttcatgggtaaccttgattggtgtgtggtgatggtgcatttttctttttgtgtggtagtcataatttttttattaatctaggtttggacgctgtcgtatgacagaatttggctcatcctaccatgaaagttgccaccctgcagtatgttttgggccttttggcatattgatatgtttcataacatgttctttttccttaacagaaactgtacaggcgttatgttgtgaagaggaatcaacgcaaacgccagagagaggaagatctaaagaaagaagagaagaaatcctcagagaagcgatccaagaccatgcatgagactataattgaaagtgttgataacctaggaggcagtgttgaagtgacaaaagaggatgaagaaaagatgagcaaagatcaatcagcaaatgttcatgctgaactgccaaaagagggtcagataaaacttggcacagatcatccaattgttaaccatggcgaaccagcaaaagagggtgatgaaaatatgaacactgatcattcagaagctgttctcgataaacctgca

SEQ ID NO: 9416 - DNA, 806 bp, Zea mays
gctaccaaacagcttcttttgaaggtcaacacgtcctgcaatcagtagttgctgttatataaatgtttatatgtcaggtaagtgatatattaataaaaacaatacctgttgaaagtacactactaataatggcctctacgaggccaatgttatcaaatttctttaatctagtgggaaacatcggataactgtcccacatgccaaacccaccattcccactagggtaaagaccatcacttgtttgccaggtatcctccagcatgtcatcatagtcttggaacctgggagcataaacaacttgtataaagcaatcatatcgaagcacaaacaccaaaactgaaaaaaaaaatcatcttaccaagatcgaggaggtggagggtactcttctggaacaagaacccttgggtaaagaagacccataggaggaacctatttttccacgacttagagtaaattgctggaacatcaattgcaacaatccagtaggaagtgtaatagagatatccattttgtgtgtgcacaattgtgcatgaatgtgcatgagagaggcagaggaataggaatggcagaagttcccttaaagacggggatatgctccgttgcccaaccaatccccaccccctgtgtgggctaacagcatgaggccccaaattcaggttggggctgggtacaggctccaaactcacttgtcgaactcctggcccctctctacatatatgcagaacaaccctttttattaaatcttatataacctacaccctcctggaaccctagttctatccccaatcacgctgcaggggtaccga

SEQ ID NO: 9417 - DNA, 791 bp, Zea mays
tgtagggaagtgtgccacagccctggagtaagcacagagccgatcctccatgccttcggcgaatgtgagctgctcctctgcagccgcagccgatgctaattcagctatcaggctcgcaacctaccaagacaacaatgcaattcagtctcttgaaaaaagatcattgcttctcagtgataattggatgaaagatagccaataatttggacagattgtaaaacatccatgacagaacaaacctcagatcggtaattcttttccaccacaccaacagtagcccctggatgccgagcaccaacaagcatgaaagctgaaatccatatcaacttctctagcatctgcttctgaaaggcttccttttcaagcacctgatgaggtaggttgcagcacaaatacacaattactacaaatgatcgtagttcaatacttgaacatgcaaaaagaagtgcaaggaccattacatgagaacataaatagacaaatatgaaaatagtacattactaattactaatattttgaatcctatcacaagtagataattttggtgatgaaccataactccctgagctcactgaatttgatgattttcatcattatggctattataatgttatttcaagctggattaggcatgcggaataatagattgattacagaggatatgatgttacacatataaaggcaacaatgacctaaggtttacagaagtacaaccaatcagcggtgatccttgcctaatcaagattaaattatctatcctagccatatgggcgacttggcagaacaggggt

SEQ ID NO: 9418 - DNA, 854 bp, Zea mays
tgccaccgtcgtcatcgctgaccaacccggctggtcgcctctctgctccatccatgcacgttaccactatgcagatgcagccgaaacaaacactggctagaaaggcagcccaacgggcctactgtcattcgctccggcatcctactggtggtcccagttgcaccggccgatgaccagttcatcatttttctcgacgaatttgtgcacagaatttactaaaaattcttcgcacgtggcaaaaccaggggaaaaatcgacaactagtcggggtttttttaatccctgatagaatagtccctgctattcatccatgaaaaccaaacacgtacactacgtcaccgtcatggatggagccagtgaactgatgattttttccccaccccgcacgcaacagcatgggtgacaacaaccactcccgctgcggttgggcgagcacatctctacgcacttgacactcacgcaaacctaacgcatactagattaatcatcgccaccaactatcggcgacagaaacgatgggccccgcttctcttaatcacggtgcttgaattagtgcgcgcatagtagtgaaaaataatagtgaaaaataagcagtgcgtgttttggtgtggtggttggtgagccgtccggcccaataaaaacccctcgcaccacctcgtccctcttcgtcgcatcgcacgccatcagcagctagcgcgctcctcgagcccagcagagaaaggccggcctacccactctctctctctctctctccagtctccaccggcagcgctaatcgtaatagccatgggctccaccgccggcgacgtggccgcggtggtggacgaggaggcgtgcaaaactcgatgcagggg

SEQ ID NO: 9419 - DNA, 993 bp, Zea mays
tgctttgggcgcccgcgcagggtcgtctttagtctccaccaccggtttcttccctcggcggtccgcattgtcttgtccagggtagccgtcatatggcagttggttcaattcgaagaccctattcagacggtcattcgacccgcggatctcccagctgcgccggccctctatcctcggcacataacgcccaacaagccgcaccgcctcatcctcagcttcacgcacaaaggcggccggatcacggtttcgcagatttagcgtgaaggcgggactccgcaccatctctccaccacggaaaggcatctggcgagggcatacttcgcccaacgcccaaccatgcgccaagggccataccccgtacgccacaaactcttcaaccaagtcgcgcccactgctctggccggcggcacaccgaagggccccttcgtccacatcatcctccgccacttcaaagggcgggtacgccgagtaaaaatgagagcacatctcggacacgggaagtccctcatggccttcgacggtaccctcagcaacgtaaaaccaaaattcattccagttgccccacttgttgcgggcgcaagggaccaactcgactacctgcatcgtggtcttgccggtcttcggcgtaaatgtacaggacccaaactgagcaacttcatctccaatcatcctcttctgccagtgtaaacaataatgcttcgcgaagacttcgactgatggccgtccgccgtacgaagtcgtcgcccagacatacttcgacagagccaccacggcattcggagtcagctgatggatctgaacgttaaatctgcgcaggacttctccaacaaatcagtgcgcaggcaggcggagaccggcggtgaagaatgcctcgaacacaaccaactcgcccttcggctacggggacttcctccgtcctcgggacacgagcgactccgccgccgaagtaacccagtcaaagcatatcttagacgcggttcggaggggtttccc

SEQ ID NO: 9420 - DNA, 831 bp, Zea mays
tgagcacacatgaagcaagatggatgcccaagctgcactctacggagttttcagttcacaagcaatcgctctgatcagctcagcccagcatgttgctacttcactcgtttgttttggctgcatcagttttctttgcatcatcattctcggcaggagcttccttcactggttgctgcacatcagtggcatgggctacttgttcagaagatacttccgagttggcaggctcactaccgttaacaggagcgggcaaagctacagagacagaactgtccaaagatgattctgccggttcatccaattttctttccacctctaatggttcatctactgttttctctgccactatctcaactgatggggctgaagactctgcggcagcctcagcctcggtatcgttatttgaagcatttggatgccattccatcccttcttcatttttcaatcgctcttcctcagtacaacaatttggctgttcagtacattctgctacatcttttacctcctcaacactaccatttccaagatacactgtttccatttcatcctcagtgccaatgactttaccatcatcagcttcctcagtctttagtgatgtctcctcagaattgggggatgatgaaggaacagaggcagatgatcggtcatcaatgcctctctctccatcaaatgtgaaccagtttgaattttgtaaagagggagctgaaatacatagatgcataatctatcagcctacacatgaaaactaaaggtgacaacatttcaagatagtaaattaccccttcctggtcatctcccaaacgcaaaagaagatattacccacctcagggg

SEQ ID NO: 9421 - DNA, 814 bp, Zea mays
tgcgatgagcagtggtaacagcgactcatcatcaggttcgtcaatcgtcaggtgccgatgccacgagctgtgcgaagtactacggggagtcaccggagtccgacgacgctgcccggcagcgtcgtcgtccccgcagcagctcggccccggcctgcagcaatcgtccatggcggccccggcagcagccgccgccaccgcgtgtggcagagccgccgggagcacgctggctctcagcagagctcgcggcacggccgcggcgccagcgcttgtctcggcgctgccggagatgaggacgcacacgagaaccaccactaggaagttggagacctgcatgttgcttcttttatttctgcctttctggttctggcttctgcttcactgtatttgcatggacggattctggtgagttgcgatgcctgcctttttatagaggagtacggggagggttttcgtgcgatgatacgattgaagaaaatcgcctgcaactacgtgagctagccggcggagccgcgacaagccacgggcgggcgccccgaggtggcctgtagtctgctccgtccgcaccggcgccgccacacacatgaaacaatccgcgatcttcaatcttcggcgaggatggatggatgggtcgtatatgctagaagaggggacgtaagctgaacggaactcagatcccctccggatcgaaacgaaaagaaggatctaatttcttcctcgtcctcttcaatctgaagggtttgtctgcggctttaatcggctgcggctctacggtattttgtttacagcggcagcaggggtcccgagcacgagtagt

SEQ ID NO: 9422 - DNA, 757 bp, Zea mays
tgactcgctgcaaacataaacagccgacaacgctattatacaagacctgacagaccaccgtccgtcacacgaggaaaccaactttcccactccatactttgcaacatgaggcaacaaatcaaaatctacagcaaatgaatacctagtacaatggacgctgctatccctttcgacgctaagacaaaaagaacacatacacaacccctcctctatctgctggcgtctgagtatgtacaggcgcgatcccaggcaagatcctgtggtttaccaacacttggttctgctcttctacttgtttgtggaaaggatttggggagcgctgtcgacagtgactcttctctggccttcgccttcagagcaccgcttagtctcgctccctgaacagttttctttcgacattgttttgggccagtgtgtgctttcagcacagagtgcttccatgtgtccagaatggatggataattttagcctcaagccaatgataggagacaagaaatcaattgtttaataatatggccagcctgttatatccaggcaagggagcctcggtcattgttgggggcttgagggcggcccctggttggtgttggtggtctgtttgcattcaactcctggattttatttcaataaaatatgttgttagaaatagccaaagcaataaaagtcactacaatatctaatgttttacatatttatactataaacgaccattacctgcatccatgtgtcctcaatatgatgctccggagaggtctca

SEQ ID NO: 9423 - DNA, 819 bp, Zea mays
ggaccctgcggggcgctctgtggatccccctgcgccgcgaaggccgcgcctgccaccaggaccaccagcgccagcgtgcgcgccgccgttggcgaggcgcgggggagcgcctcgcagccgcaggcgtctcccgacggcgcattctccttggccgccgtggaaggcggcagcagcaacggctgctgcttctccacgtcggcgaccggatcccgcgtctttgcctccgctggtttcattgcgcgtggagctacagcacttacagagccgtgcaagtgcaagagcgacagatttatatatatatactggatacgccggcgccggcggcagctataccatgaaagcagcaaatgcacaagcagtcaagcagataagcgcgcgcctccacggcagaaacaagaaggcggacacgtccgaggctcccatgcgagagcgatctttgcaaggccagggacgaacacacctgagtatcttaagtagtgactggagatcaatcaaagaggtaatgacattttagtgggtacataagtcagaacggaacaaaaggaacagcgtgcacgatgtggcctaagattttggttttcgaccagcagccaagaaaaatagtagatgtggacggacacccaggggcgccttccccaaaattctatccaagtcgaaggatataggccatgtctaataagcacactttgttgcgaaatcgcgccatgagtgctgggctacgacacgatcaggtgttttggtgggccatccgttactctgcatctgcatgtctgatgtccccacccatagctggagtagggtttacaatgatggatgcaa

SEQ ID NO: 9424 - DNA, 835 bp, Zea mays
acgctctagggatccccctgccactcgcgatgaggcgctcttggtctctgtcgcttcggcaacttagatcattggatagatactggataccttgctctgatcgatttactctggctcctggtcaatgagttgagtttactatggctaatccgaattaggtttccttagcaataatcggtctgttaattagatcatttagcaatagctttgtggccttatgtttttatgctgaaacagtaatgttgttcatgggtttgtcatgatctggcacttttttctctcctttatatcaaaacaaaccagtaggaaagctgcttatgttaaaaagtaggggcctgccaaagaaaacttttctcttatcttagctactgataaataagagaattaattatttcaaggaacaaatgatgatgctttgtccccacgaccacgagatgaccacgactagattctgatctgatctcccctctacacagctttgtcttcttctttttttttaaaaaaaaatttgtttcttgactacaagctgatgtagaaaggatggggaacaggaaaccaacatccaactaaaaagcatctgacaaacaaatttattgttatatcttctgtatatcaagacaatcgactgttaatgggcaaaacctatagtgattgactttccaaaatctaattataacctgcattttttaaatggaggaagttttaaatggtttttattggcataaaatttaggaacctccactcaagtttgggtggttaatttgtattggtgatgttctctatttactacaagcaccgttgtatgagtaaaagtagtactgcaggggtactcgag

SEQ ID NO: 9425 - DNA, 758 bp, Zea mays
tgccgcttcagaatttttctcagtttggacagcagtgtcggtttggacttccgtgccctgcatttgtattgacgattccatactctgtttgggattgggtgtagccacacatgaccagcaaactagtgcagggcgtttcttcaccacagcatgagtatccgctgaaggcttactcccagcctgccaaaaaccatgaggaatcgactcagaagtactagtagacataatatcgtttcatctgtttttattagaactagtgcttggaatagaatttttgtagcgaaatacctcgggactctgggattgcagcatgtctacatccacaaccttagatcttggatcagagacaaagggcacatgggatcttatgaaactcacagaacggttcacaaaacctaagaacctagtctgctgaatttgtctgccaaggtcatgtgcccaagacgatgacataacctgccaacacattcagtacagcagtaaatatttgttttcttttaagggcagaaaattgtttgcagagtagttatccttccttctaaacaactagttaactacagtattcaatatgattctgtgttccactttgcttagatactcaaatatcagcaaattaacgaactggctgaaaggtacctacctctatacgaagcttggcagcagaaactatgccaagagatggcactaggtcgtttctgttaactatggtggtaacaaagtctttacccgactcagccaagtcccatgtcatgcaagca

SEQ ID NO: 9426 - DNA, 727 bp, Zea mays
tgcaaggtatacgtccgcccgcgcccaattcgccacccgatctccgccgattcccctcgaatttcccggatgatttggctgggctcgtgggattcccgcccctgccgccgctccgctgcccgctgccgcccggcggttatttccacgccgatgtttagatggattggctgagagctcggatcctactttttttgcgcgtgctggcaccagtgcattctttccaaatgcggaatcgcgtggccggcggttcggcctcttagatcgctgcccgctgtcgtcaagccccgagttttggagctgcgtgctgttgttggggtaggtgttctatgctgtcttagccgcggaatcaactcctcatggattgtactaattgataggctagtgttggattcttctgttgcatgacgcagtactcacttaagctgctcctagtttgcgcatggctaactgagaccgtgttacccatagtttacccaaaacactgtattttcccactatatgcagagtggagtttgaatatgggtatggagatggttaagctgctggagatattttttctgaaatgtttctttttgttctgtggattaaccatggcaagtgtggcggtgtacttcacgcacgcaacatgtaacagtcgctcttgaagatctcacatgttgattctttccctgttcgtcacaggataaacttgcgtattttagaataaaggagctcaaagatatcttaa

SEQ ID NO: 9427 - DNA, 772 bp, Zea mays
gtatggcatgtgtagtataacatcaggccaagtttgactatcactatatatatggcaacatcacagctcaaataagatctttaagtccaaactggtccagttccaattgtgccatagttcaaaatggtcggcaatgtgtacactgtgcaaaacaagtcataatatttgatgctgccctgggtagtgggaaaaggttcagaactcaaaagcaagcatgcatagtatctccagcagcttactcatcctatcccctgtcacatctccaatttcaaacttcactccgcgaatagtgcagtctacagtgtaaaacagtgtttttgagtggccatataggtatcttgatgaacacggtaaatgtactccttcaacatctacccatcctaagctagtaactgcatagatcgatggatcaagcaccaatttgatgcatgatggtcaatgcggaccccagttatgtcaggtatagaacatatgcatggatctaagcttaattaagctttagggcaatatactcttatctagaaggcaaggaacatgccaggtcataaaatgaattacataaaatcaaagagcagtactatcaaggtggacgagagcaaagtacaaaaccaaagttaaatatcaacagcaacaacatacccaacaaccattgtggtcatcgccgtggctacacagcctggagcgctaatattgctggaagtgacgatcttttttatctcttcatgttcaactttgtggttatccttcagggggatctctagagtcgtcggca

SEQ ID NO: 9428 - DNA, 820 bp, Zea mays
atttatacgctaaccatcttctgcccacaccctgtttcgatgacgtagctctgtccgaagctgttccacttgagctttcaaatctccgattggatcgttgctgccgccgctgctcccttcatgtcttggagccaactgatgatgaggcacaccaataggtctagcggacttacgtgcggttttcctcatacgcggcatatctccataaggggggaaaatttattagtgtagttttaaaacatgatgcatgcataattacggaatcaacttttgtagattcccaacctcctatatgtggcggaaccacccaaattattccaacttaagtgcctaagtcccgccttagaggctagaccacacttaaatgggaataacacgtcagtcccttggatctagtccgacgaggccactaacaggatcaagtaccacgtactcactcgatggtgaggcacagagcaaatacaataaagcataaaaccatacattaaggagtatcaaattataacatcaacctcggagttttagcaaaagtggagatcatggttcgaaatgcagcggaataaaactaacgataagtaaacggagagatggggaagcctgtcccatcactcctcatgctcctcctcagccgaggtagggtcccactcgactgtccaacccggtggcaagatggacgaccaagtcactccagcaaccatgtcctccagagaacctgtaaaattatgccacaagcaaggctgagtatactaatactcagctacacttacccggtgtgaggagtctactcctctacctctagacatgcaggggaaccgagcag

SEQ ID NO: 9429 - DNA, 847 bp, Zea mays
gacgactctagagatccccctgaagtagatggaggaggggcaagtctgggtgggccatttgcggcattattggcagacatggacagtgatccaaaatcagattttcgttgcatcatgctcaggcctgtactggaactgcttggattggagaggccagtgctcaatcctccaattggatttccaaaacctagagctgcactgccctgattcaaatagctgccagttgagttcatgcccatcagattaggcgtgtttgaccagctcatttggttgcttttcgcttgccctatagaattcccgttgccaccaaaccctatgttacctgagctaaatccagaaatattttgatttatgcttggacgatgctcggttgctgtaatgctagtaacattgctaggttttgggggccaatcagcaaaaggatcaatatcgtcaagtccgtcgctagatagccttccagattcattctccttgctaatagacaaggatgcattgaagtcggatgacgagcttcttcgaggaggccactcaatgtcaacaggggcacatgagccagaagtttgaggtcctgaactgggcacaagagattgtactggttgtggttgcgcaggtgggattgtagctgctgtagcatgagaaactaatgatggctgctttgctcgggtgctcaaatcaaaggggagtggtgtggattgctttgtttgagtactgaagtcaaaagggtgtactgagggttgctttgtctgtgcactagaatcaactgagagagatggaacaccggttttcttagaaggaccccagtcttcatcccatggagggctgctctttgcagggggatcctctagag

SEQ ID NO: 9430 - DNA, 787 bp, Zea mays
tgcacgccatgaacatggaggccatcgaggcagcatgacggacaaggcgacttcgtcgtctccttgcttgctagcactagcagtggcggaggtccgtaaaatgaatgctcaggacaatctataaataaatataataatgatgcattacttcatatttttaagtttttggtgctttatttaaaaaattaactaatcgaacgataaatatttaagaacggatagtaacattttaaaacaattcagtggaactatggcacatagagaaagagaaccatacattcaggaataatttctcataacaggggagaatcacgggcacatggcagcagcactcagcacagcgctcgccacccattggccagggaggtacgacgccaatgcaggacttttgggctagactttttgactggaaaaaacttatatacaagaggacttttaggctgcacctcaggcggttgccccaggtccaaatacgcccttgcttgcgagccagcccccaactgagagtagtgaaatcgaaagcaagtgcaacacacagagcgcctacctgccgctatgtcgtaccagaattctaacattctggatcgtaaataacaacacagagataatacgtatggacagccgtaaaaagatagactctttgcgaggagcctgtcacttacattttttttccttcacttcgcccttataaaactctcgagagactttatattaaatattgtacatgccccctgaacacctacgtactaggagcacgtttgtttagtgggacaattaaaatccagca

SEQ ID NO: 9431 - DNA, 771 bp, Zea mays
gagcgcaatgtccgcttcggagtcagagagcacggaatgggcgccatttgcaacggcattgctctgcacagcccagggtttgttccgtactgtgctacattctttgtcttcactgattacatgagaggtgccatgaggatctcggccctgtctgaagccggagtcatctatgtcatgacccacgactctattggtctcggagaagatggcccgacccatcagcccatcgagcacctggtgagcttccgtgcgatgccgaacatactgatgctccgccctgctgatggcaacgagactgccggagcatacaaagtcgcggtcctcaacaggaagaggccgtccatcctcgctctctccaggcaaaagctccctcacctgcctggcacctcgatcgagggcgtggagaagggcgggtacaccatctctgacaactcgaccggcaacaagcctgacatcattgtgatgggcaccggctccgagctggagatcgcggccaaggccgccgacgagctgaggaaggaggggaagacggtccgcgtcgtctcgttcgtctcctgggaactctttgatgagcagtcggatgagtacaaggagagcgtcctccctgccgccgtcacagcgaggatcagcatcgaggccgggtccactcttggctggcagaagtacgtcggagcccagggcaaggccattggcatcgacaagttcggcgcgagtgctcctgccgggacgatctacaaggagtacggcatcaccgtggagagcatcattgca

SEQ ID NO: 9432 - DNA, 750 bp, Zea mays
tgccagtttatttgcttcttactgtaactgccataaacttggcaattagctggaaataattagtttcatcactcgccagtcaaatattctgattcttctcctgagggaatattctgataagttgctatgcactgtaaacaacataccctttgcaggtatttatgagtgcagcaatattataggaaatcagaggaattttgttgttttcattactcagaaatgtataggatgtggttcattggttcttttctcaataacatttcttcccattaactgttgatttagcatagttattactcttcacccaagcaggtattccatttcctttatgaaacccttgtttatttagaattggtacagctatattattttgtgtttgactttacttggcctaagaacacatttgcatgaactcgcatggaagattttgattgggggattaatgatagcaatctattattttctcgtgttttgtcattcaggtatgttttcaatcatcacgtttgaagaattcatttcaattgccctagatgcagacagaactgtcggcatatatcccgagattaaagatccagtttttatcaacaagcatgtatgtcccccagttctcaagaggaaatatgcactttattatggttcgtggtattatatagttatgtcactgctacagaaaatctatttagatgatatatatgattatatgaactttctgtagaatgatgatatcagcaggggtaccgaggctcgaat

SEQ ID NO: 9433 - DNA, 1230 bp, Zea mays
cttgaggataacccctgaacaacaagagtcagggtttctggccctggggcaccggactgtccggtgtgcactggtttatccggtgcaccctctgccaggtggggccaggctggccctgggaagaggccttcccttcacagaaacccgagagcgccctgtttcagaaaggaattttagtggcgcaccggacagtgcaccggactgtccggtgtgcaccggacagtgactgttcactgtccggtgtgccatgagtccaacggctaactgtcagaactagccgttggaaacgaccgttggcgcatcggtggcgcaccgttggtagaccggtggcgcaccggactgtccggtgcgccagtgtgtaggaaaatgcctgtaacggctagttggtgggtgaggtctatttataccccttccacccaccatattcaatgtcttgcaccccacatttgttccagcacattgctagagcattgcaagcaccaaaagcctagtgaggagattagagaatcctaatccgcatttgttcctcattagcgctagcgagagccacctagatcacacaccacttgcattaggcttctcttggtcaagcgaaagtctacggcttgttactcttggtgatcggcatcacctagacggcttggtggtgttgggagctcggtgatcaccgtgaagatcttgttggtgacccgactcaagtttgtaagcggtctcgagggatccaccgtgccggagtggcaaaggatcatctcgtagtgagcacttggttcttgcgaggaccaagggggagcgatacccttgcgcgggtgctccaacgtggactagtggagagtgctgactcttcgatacctcgggaaaaaattggaggagtcttcatacccttgctttacattccgcatttaatttgagcatttcactttattcaattgcttagcaagtatttgaagtaatgacttagggttgttgtttttctagtagtatttatttattgctagtagttgggtgaagttgggctcttgcttagggtttaatatttatggaatttttagaaaagaccaattcacccccctcttaggcaccgttatcctttcaccaaggaccctgttcacttgcctgtagtgtcctgtgcctgtgaaccagtcatcgatccaagtcgtatatctagattctcacgtacaccttctatgtgccacctcatgtgttgggctatattcttggagatgaacaaaa

SEQ ID NO: 9434 - DNA, 785 bp, Zea mays
attcgagctcggtacccctggaaggcccaaaaaggtgtactgctagcctgttgaatgtagcaccagtgctcttgagtcgtttgctccactgatagatgaatgacatgcactgcctgaaatatatgctagcgtacgtgtaaaagggacctcaagttttcacaagtgaaaaattgctggcgggaagcctgatccaaagtgaagggcgtggaaagcagaaagcaccatcatctgacgggtaaatctcctgaaagtgttcatgtcgtcccgatgatttgcagggtaaagtgaggtctgcgacgcctttcgtgtttgctttcactaacagtccgcgtcacttattggattcaaacagacagcaatgatgacagcgacacacatgaaagaaaaatcatagctacttatacactagctgatttgttcccatccagcttgtgatccgttctcgaatatttgtcgcacgctagtttatttttgaactaaattgcgacaaataaaaaaaacagatagagtagttattagcatatgcttggaggaaatccattttggaaagaaaagatggccaattataagcggcgtacaccttgtggtgagggttttcaccctcctagttacagacgccaatatatatatagaacaaatcagtattggatacatatcatattccgtgagaccgtgaccaatcttgcattggaacagtctatgtagcccatacatataacagtgataagtaattaatagcatcgtttccagtaattatattgcagggggatccctctagagtcgtc

SEQ ID NO: 9435 - DNA, 901 bp, Zea mays
tgccgccgccgcctggacgcagcttctgcagcacatttgtagccgcagctattatcaaaatcggcagccgaacagcttgaaggttcttaatgttccaattgtatatgattttatcaggttaatgtgaatggggggataaagaaagaagataaacaatggaaaacatcatataccttgtcattctgtaggctttgaaggtcccccagtgccttttgcctcgactgcgccatgaacaaaacagatgttcaagtaactaaaaaaggtgctctaggcttctagcgcaaagtagtgatatgagaactgcaatatcgaccaacagtccaccattttttttcatcctacaaggtttaggcagacaagaacccaaatctcataaaaccacctaaggccttgctcgtttacaccaaaccagctctagattagcatggattagagttaaatccatgtcataatccatgccccaaaataatccaagccttctcaaaaaaaattattcggttaaccccatcatggattataatccaagggtttggaaatttttttaactatggaaggcattgattctatccatagctcattaggtatggaacaaatccatgaagataatgcacaagtttatattagaatccatggatcaaaagaataactagctttaaaagatacatggattaaatgatgaatttaatcccaccatgggattgagtgaggtatggattcacccaatccagacctggattaatggtgggatttcatcccttgtaaccgaacaaggctttagcaagattcggaagaatagaggctgcttgtccgagagagattgcaaaaccatatcatcgtgtatcctccacacgtcaaaaagcatcttctcacttcttctttgggacattaactcatcaaacga

SEQ ID NO: 9436 - DNA, 807 bp, Zea mays
tgcctctccatctccaggtagctcctgtggaacacgtgggcgttcctgtacaccggtcccatcggcacgtagtccttgtcaggcaacggagataccttgtccttcttcctgatggcttccattatcgcggaccgagctctcgcgaggccaagctctagtcgctccagtttcacgtcgtctcttctcctctcaacctgtggcggcgtggactggattatcacctcatctgagcctccctgtaacaaaaaaacaaggattacatcatcattggattatatatgttctgccaaaaaggtggcatgatggtagtagtagtccgagtactagataggagacacgccatgaattccacgtgtgtaaaccaccagtgaatttggcagttgcaagtgcagtcgtgactcaacgggcatttttaaacagagttcctgctgttctgtaaaacgttcctccagtaagtcgcacgaccaattaactgctagtgggtgtgcgtgcatgcaattaaccagctagttacgggctatgcgcagtactaccgtcactggagacgccggagccggtgcggatggcggcggcgcttcgtcatagccgaagctggagttgacgaaggagaggaagccacgatcatcaccaccatgaccccggacctcctggtgcacctctttgccagtgctgttcctgaagccggcggcggcggagtagtacgagctggcggtggccaataggtgctcgccaccaccgccaactccaccggcactcgtcaaggacgagaaggaagagggggcagaccgcggcggcgacaggaaccag

SEQ ID NO: 9437 - DNA, 922 bp, Zea mays
gacgactctagggatccccctgagtccctcagtgaactgaaaaccccctagtggtaaccggttcaaccggtttaagaaccggttcaaccggttttgagtccttttctcccaacggctgccagcttttgggggatcctttaaataccccccacactctctctcttcattcacttctgtccctctccacgaattcttggctgaccaaccttcaaacaagagcattcaattcacctctcacacccgaaatcacatctctttcaatcgtttgaaggacccttggtgtgaggtgaagtcgatctaactcgctgttgatttcatcttgattctcccattctcttcatctcttgagctcatcgcaaacttgaatcttgtgcggatttgttactcttggaaccttgcgttccttgacagatagaggttgcttgggagtctccaaatttgtggacgaccccaagaagtttgtatcacccgctcgttgagcaaatttgagaagagattgccttgaccttggtggtcggcttgtggaggattagggttggaaaagacccggccctttgtgggctcctcaacgaggagtaggacacctttgtggtggttgccgaacctcgggttaaatcgtgtgttcttgtgtgttcttgataagtgctttaatttgttggttagttcatattcgattatattgtgtgcaaatcgtgtgaaaacaattcataccgatttgtcacctattcgagtggattttctctagggcaagtcttcagcaaaatctctcattactttgtcacacttgttcaactgtttatctaatctaagttgagcaggttcaaacttgttcagctgtaaacaaaaacaaaatgaaccggtttgcaccagtgcaacttgaatttgacactatctcaaagttgttagtgaaaaattcagaggg

SEQ ID NO: 9438 - DNA, 848 bp, Zea mays
tctcgtacccccggaactggccttctctcttgatattttaaaactgtttggggctgcatctgggttgcacaataatgcacagaagtcaaatgtctatcctataaggtgctctgaacaagacttggcagttgcccagaacatgattccagggggtatttcagcattcccctgcacttatttggggctgcctctttccttacacaagctgaccaaacagcagttccaaccaattgttgagaagattgctgatcagctccccaattggaaggcagatctcatgactcgagctgggaggagagtgcaggttcagcatgttctcacaagcatgttggtctatcttgctatggcagttgacattccaaaatggggtctagatgcaattgataaaattcgcaggggctttctttggaggggccggaaggaggcaaggcaagaggaggccattgtcttgtagcctggggtcgtgtttgcagaccactgcagcttggaggtcttggcatatctagctttcaagaattatgttgggcccttcgaatgcgttggctatggctgcagaagactgatccttctcgaccttggtctgaactccacataaaagtgcctagaaaagctagaattttcttcctggaggtggtcattactgaggtgggagatggcaaaaatacaaagttttggaaggataagtggttatatggtaagcgaattaaagatcttactccaagtttatataatattataccgaagaggattatcaataccaggacagtctatgaggcaattacagacagaaaatggatctctgatattaaaggtcctctgacagtgggagtcttaacagagtatcttca

SEQ ID NO: 9439 - DNA, 768 bp, Zea mays
accccgaaatttgggccgacaaatctgtttattcctcgatttattgttcatttgattccctaatagctgccactggctattatgattatttcagcaccagtcgtttgtctgcaattttcattgaaatatttgttcactcaaagttgtaaccaatgaacctgataaattcagaacatattggtttttacaaatatcgattattgccatttatggctgttttggatagatatgtacacatttttaccttgtatgctcatttacctgcatttagtttagttactttatcacctggagtattattattggtatattccaattctcctttttatatgatgaattgttctacaatatgtttattgtactctgtagaatgctagaatttgggacttctaatgtaatctaagagttgacactctggagtttactagtttctatcactgtaattaatgaaacagtacacatttattcagtaatagaagctatcattaatctggcaactcatttcgttccatgtggtggtatgtcaagttttttgtgatgatttggatcagatgaattcatttaatattttgagatacttatcttttctttctcttggcaggtgaaaattggtctccgtgtccttacaaggcctatgccagagaggctaccacatatctacagaactactgggagagaacttcaatgagagagttttgccttcaatcatccatgaaacactgaaagctgttgttgctcaatataatgctagtcaggggaaccgagcaa

SEQ ID NO: 9440 - DNA, 799 bp, Zea mays
cccccctgcgctgcggcgcaggtatccttttccgggttgaggcacaagacagtatgccagacagtgttgtatggtactatgtcccagtgtggtctcgaacagaccagcctttcgcacacgccctttacagtttattatatgcggcttaaggttatttaggagatggagccgttggctatctccaacagatcctaactcatcttctatcttatttactattttcaaatttatctatacaaatagtgtcaaactgtatcatctacagtttcacgtttcctattttacacaatctactgaaaacaatcttatagtagtagctcctcccaaacaactgtacttctttattgttgttgttgttgttgttgttgttatgctgaaactcgtctttaaacaacttcgcatgaaaaagtgtttaatactatgaagaaaccggagccggttttcgttttccaggacggggaacggtaaattttaccagtttccggtaaaaaaaaccggacgagaagtttacctctgcttcacactggttctgatccaaacagcctcgatagacctgaagcttgaagtcctctctgatccacaacctctcacataattttgctatatctcacaccaaacctgacggcccgacccaatttgagcttcacaaaattttggccaatggccatcctcccaacctttcctgtaggacagaaaaaaaaagacactttgtatctctcaagcacttcctggatatctgccgtgctgtcttgcgccaccagaataccagattaaaaagcagggggatcctctagagtcg

SEQ ID NO: 9441 - DNA, 826 bp, Zea mays
tgcggtggcgccggcagctcgagcagccggaagcggccgcgccgggagctgaagcacccgacgtaccgcggcgtgcgcatgcgtgcgtggggcaagtgggtgtccgagatccgtgagccccgcaagaagtcgcgcatctggctgggcaccttcgacacccccgagatggcggcgcgcgcgcacgacgtcgccgcgctcgccatcaagggccgcgccgcgcacctcaacttcccggggatgtcccacgagctgccccgcgccgcatcggcggcgcccgaggacgtgcgcgccgcggcggcgctcgcggccgcgatggagatggagagcgtggcgccgcccacgccgcctggcgattctagccacagcgcccgcaatgacgagaacgaagagccggccgcatcgagctcatccggcaacgacgccgacaatgcgcagagcgaagagcaggctgcgccgtcggagcactcggtgctggcggacgggcacgtccttgatctcgcgctcttcgagctgccggacgttctactcgagttcggcttcgcgctgccgccgacgttgacgtcttgtgcctacgatttgtcctgggatgagccgttgctgctctgggagcactgacgaacaagagggggatggggagcgacatgcttgccattgtgaagttagataggtgctgatgatccgcatacttttactaatcagcattgaatcgttctggtcttgcgtcaatcctgatgctaacttacagatgtctgagtgcaacatggtagcaaattcatagttaatcgattcacagatttgtataacagcccaatagacttcccgaggg

SEQ ID NO: 9442 - DNA, 796 bp, Zea mays
aagactctagtagatccttttgctttaagcttgcttgattgagtgtttttttgggctgagtgtcttttatgacatgaaggggctattgacagaaggatttttctggattccatcactgggaggtcctacaacaattgcagctcggcaaagtggttctggaattacatggctcttcccatttgtggtattgaaattgatcccattaacatataaattggttgtttcgttcctagttctgaaaaatagttcgatctattgcccttgagtgaccatactagtatgttgcaacgtgtactcaatttagatcataccaatgaacagtggcatgtttcttttcatagttagataggaagcacattcgacggcattcaagtaaacaaaagctttgccatgtgcatatgttattaaggcatcactttggtgttgcttaagcgccaaagcgctgcatgcacgacaccacagcagatgatttgtcctagatctgtgtgatatccgctttacagattaggtgtccaaaaaacatccctttggcgtctgaatcatgcccaatcgctcgtggtaagtgatctgggtgagtgagatccatggagaacggcaggaaaaaatcaagagagagtgtgtgagggaaattagagcgcaagagggagggagattcggcttaccagtgagcgggagaggaacaggaagctgcagcttatctgcgccgacgcattcttccactgctgggagaagttgccgcccgcccgctgccgagctgtgcggctgcggcgctgcgccatcttctccccgaggaaca

SEQ ID NO: 9443 - DNA, 808 bp, Zea mays
gctcggtacccctgcctgaagccctgaataagctcaatgacactacggattgatctatgtacgccaacaattgccccacaaattttacacaataatctcagaacattaatgatgacctatgaagacttcaacagccaacaaaatcaataatgtacatgatgctcagttagtgatctaattaactctcagacacatagaagcaagaccccataaaaaacttggccccacaaaaagcaccatcaaacttggctaaaggaacatttagcatctcatctctcttttattttgaatcaaaaagcttgcacaaactataatgcgatggtcaaaattgagaatttgcattgtcatcactcctcaaatataacaagtgaacagaaaatgtgctagcccatccaaatcctcatatggtctttatctaaataatatgtattcaatgtacaaggagagtacctgtttatcaccgatggtgcaattcgacatcttaatctcaagttctccgcatcaaaaacacctaagttaccatcattgaaggcagcaaaaactagctggctgttacatgagtatgatgcatgcgatatggaagctgacaatgtgtcctggggtatccactgaaacaagataaacatatttaataggtaatcaggcaatgagaaaatagtactgttttatcaagtatactatgtgcaacctgatagatcctctccatttttgatgcgtcatatatggctagttgagtctcatgtactactagcaagtgactttgatcagaactaaactggacccgtgtatctcctgaaggagttttcca

SEQ ID NO: 9444 - DNA, 816 bp, Zea mays
aaattaagcgctccacgcgcaagttggtgtgggtgggccgtgggcacacctcgcctccgcgcgtgcgcgtacacggtgactaggtttgccgccactccgtccgacgacacatatacatatggcatgcatgccgcacgcagcgcgctagcgccgtgctcgtgcacccgcgcctgccgcctgccgcctgtggctcctctgccggctgccggctggcatgcatatcccagcgcatgcatgcaggacaccatcgcgccgaccgatcgatatccaccgttcaaaacatcagcgctagagatttcatgtgagcagctctcgcgctggagagcgtatcggtcaatctaccggcgcgcaacaatgatgcaaacctgcgaccgcccctcgctcgctgatcacccctgctgccaccccatcccatgccgtgacaaacctcaccggtacatgcatataccgtgtccggccgggccggtcgtcggatcggtcgtcgacttgcttgctcttcggtagctaagatctcgctgctagctagctttcgatgtggctccatgcctccatcgtcttcgtcccactatcatcttaatttccacagctagagagcacgcgcaccagatcgatatatatatagagatgcatatcctgtgatagacgcatatgaattcggatgacgtttcgaacgaattagctctctcgatcgtgaacgtggaagcctacgtggatgcgagcgagctagcgagggcaccttttctgccctgggggatcgagctgaggtctcgcaagtagctgcggcggcgggccaggcttatcgtcgcgcgcgcggca

SEQ ID NO: 9445 - DNA, 751 bp, Zea mays
tgattcgcacaccccagcgccaaccaccgcgtttgaacgggatcccagccaggcggccggcgccggcggccgcctcgcgctcgcaatcgcaatcgcgtaccgtgtgtcttagtttgaacgaaatccgcctcactttccgctgacccggctagcttgctgctggtggggacgtcgtacgggaggagctgatgagatcgatgcgcacgacgccggctcttgttgcaggtcagcggcggcaggcaagggcaagggtaagggcgagaagcggcagcggcagccgcggttcgcgttcttgaccaagagcgaggtcgaccacctcgaggacggctaccggtggcgcaagtacggccagaaggccgtcaagaacagcccataccccaggtacgtatatgtatatattgcacgcatacattacatacatgatatacatcgacatgcacagcacgtatatatatacggttaccctactgctgcatctgcactgcactgcacgcacagtgtccatgatgtagctatagctagacatgctgcgtttgcgtgagcgcgctaatggtgggagcgctgcgatcgtgatggcgcgtacgtgtacgtgcaggagctactaccggtgcacgacgcagaagtgccccgtgaagaagcgggtggagcggtcgtcccaggacccggcggtggtgatcaccacgtacgagggcaagcacacgcaccccatcccggtcacgctccgcggcagcacccacatcctcgccgcgca

SEQ ID NO: 9446 - DNA, 842 bp, Zea mays
aaaagacaaggccattgatgttttgttaccgggttgctaccgaggcgaggcgaggcgaggcttgacgacagtggcgagttggcgggcactgtgaaccgctgatggcaaacctcgtcgacttcgccgggcgtcatgatcagcgtcggcgacatcatgatggcgtcgccagcgaccctcaccagcatgccgcgcttctggcactcttcgccgaagatggcaccgacccctgacaagaagcatcatcccacatcatacacacagaccattcggcggggcaggggaacacgccatggcctcatggccatgccattttgtgtactggctgtagctgctacattgactcaccccattcggcagggaacagatcagtcggtgacttgttgtttgtgaattcggtacccataatcatccccaagccacgtatctggagtacaggagcatcgaagttatgtattcgaaccaacaaccccttgggttgattcagagattcatacgcgtacctccccgataatcggactgtctgccagcgccctaatcccgtcctggaactttggggcgatttgcttgacatggccgggaatgtccctttcgctgacgccatttatttatttatttatttatttttgcaagccattcgtcaggaacaaacagataaataacactcgaatacgtgttctggaaagcgcggcgcggcatacataccgataaagtttcagagcttcaatggccacagcacaggcaaccggatggccggagtacgtgaatccatgagcaaatgaacctgtagcacgtgacatcgtcagcagacgaaatgttccaggaaaacactacagggtactgag

SEQ ID NO: 9447 - DNA, 777 bp, Zea mays
tgagcgcccagcgcgacgcaacgcaacgtctccggaatggaaacgaggcgggccccgccggccagacgccttgaccggaggaccggccggaccctgcgaggcgaccgcggccggcccgccccagttccaggcacggcacacggggtccggggacggggcctcccagttccaggcaccgccgggcgccggcacgcatcccacgaccgccactagcagccgtcggctcgataccggacgggggccggaggaggtggcgtcagcgaaaaaggtgggcccggctgccagcgggccaacgcgcaggtaggcccggtcaaaggggtcaccgccacgtgtcgggtgggaacgtctgaccgcggcgcggcggtttgaccaggtgtgtccggctgccaccgccaccggtagggcgccggcgccgctgactgattaccatgcccccgtgacggtagaccgtcgtccctcttcggctcttcccgttcccgccacgcttacatctggtgcttctcctgcattattattactactactactcactggtctggcctaaagcactctctagcctgctagggggggagagagctgaggagggggagggtgaagtctaacccactgatgacctttgtaccttgcgatggaaacaagcgcatagctccaggggatgggaaagaaagaggccgggaaatggacatgtcgtttgggtctaatcaattagtactactagctagtagtttctgtcacaaaaagctggatcaattaaacaaaaggccaacccaaaaagca

SEQ ID NO: 9448 - DNA, 814 bp, Zea mays
tgcgctgcattggcttcttcagtttggtcgcaccacactcttaactctttgcatctgtgttggtatcaatgacgtccagaatctcggtgaaacgggagtactaccatgtgttcattcgatccaggaaccaccagtattaacagcatttttgttcttgcatggtgccctatgtttttgttactactccatatggctaatcaatagagacaagagttactgcaataactacaaatctagaagctagtatgcatcctccgcaagctaaggctagtctttttgttataatgctactcctagctagatcccacctttaacaaggaacttgttggcaatctaccgtgcattcaagccttatgtgcaagcgtgaaagcgagttcgttagatcataatccaactatagatataattatggtttattatggatttttataaatctacacataaacgggtggtgaaagagtttaagtgttaaatgcgacatacacagtcgaatcatgatttaacggatcaggagctcgattgtacgcttgcacataagatatgattgtacaatagagtagtcgttgcctttactaacaatcttaaaaggaattgatatgttctttttcttattaatctggttgcttgatgagttattctctttatgaatagcatctttggattatgtttagggacgtgcgttcgctatcagactgtccactttattttttctctctccatacaaagtaaaaaaaaaagaagatagaagatctacctgtggtagatgcatgcatcatgcattcatgcatgtaaccgggaaggtaaaatgcatagg

SEQ ID NO: 9449 - DNA, 836 bp, Zea mays
cggacgactctagaggatccccctggcgccggcgcccccgccgcggttggggcggctgcggcgctcggcggcagcatcctggaatcggtcaccgtggcatgccccgaccacctcgtgatcgcggacctccccgtcgcgaagagcctcggtgccgtcacggcctccgctgccgccgccacgcgcgccatcggccgtcgctcccgtcgcccgctcggggagcgcgtccacatctgctcccgctgcgagttccccatcgccatctacggccgcctcgtacggacttgctaaacccttttcttttatgcggctatcaaacctcgaacatgttccgctcgtgttgctgctaaggaaattagaggtttagttaaccgcgtgtgttgttgagccatttaccaccacaaaccctactattcctctgttgatagcataagtgaaaatggagcagcggatgtgcatcatttttgttttatgcgcctgtgtttagactgttggacaaaaataccgatacttattgtagtagctcagcgggaatggctattgcctcagtgttctagcgattccattgtaaggagtgccattgttatctcgttttgtttctggcagacagtcaagggaagctgagatctactggttagcgattgaatgaaggcagtattgccgttcttttacaatgctagtacatctatttgacaatttgttttaatggaccacacatgatttgctttttggtgatactgacctaaggaatggataaatagactactcacagtttcattcaattgcgtcatgaaataatattttggcttcaggggttccgaggctcgaattcgtatcag

SEQ ID NO: 9450 - DNA, 825 bp, Zea mays
tgctgtggctccatgggatgggagtagcgcgcgtgagccgccgttcgcgctggacagcggctgcgtcagtgcagcgacagactgacagtgagtgttgtatggttcgaccgtgtgagatcgagttggatcgtgcgccgcgggacgcggcaatgaagacgacagcagggggcaggatctgtcgatgtttaaagctgacaaaacatggaggaagtaggtggcatggcagactggcaagagctgaacgagcggctggtgaaatgttttgcggtttcacaaggcagaagcgacgtgggagcacaagcgccaagtagtccaacagcactggcggacggacctcaagcaattcgcttccatgtgttctctctctgtcccctcggtctcagtagtgtcgaaggaaaacacacacaggcatgaggcatccctgtgagtttgttggtcttgaactcttgatgctgaaaatggagattaaagagcattattttgaggtaagtttgtaagaagaatgcattatttaattgtctaaagcagtcattattaattacaacttttacacaggtctgtgacattatagatgacttgtccgtatcaatattaaaccacttgactgaaaactgcaagaaagaactcgagacaataaacgggcagtatccattttgaacctatgaaggtaagcattcttgcttgttttgtaatttgactatgcagttctctggttctgtagcctaagagattgacggatcactaataatcttatgcagtatctagacaaaaccttgaagatcacttacgatgaatgagttcaaatgttaaaggtacaaacttaca

SEQ ID NO: 9451 - DNA, 799 bp, Zea mays
tgctgcttccttccctaacacggccatgcttgctttgtgctctatcattctagcttctgattgctgaagctttgtagtgtgctcagcaattggagcttctcttacccgtgcctttcttctagcaatttcagtagactattgaacaaacaagaagggtcagggtaaatggaagtagcagtaataggaatttgctcacttgcagcaaaggattaagccactagtacatacgaggatctcagcttcatgtctcatcctgctatagcgctgtgcaagaccacgagcatcttccaggggtccacccatagccattgctctcaatgggtctatagtctgaaatctcaacaaatgaaagcaactcaaaacgtatcttaaatgggatccaaatacctcacacataagtgtgttcttatttctatcagaacagcatatataatatatttcagaaggattggacttaaacttgcacttatttcagaaaagcccggactcaaacttgctctaaaaaaagctattctaaacacacaaacagaaaattatgcatatggtgatcagttccaatattccatacacaagctactggtattatatgaaccacgaagcaaaaaggtaaagcagaaacagaatgatatgcttggtaacttggattattagtatcagaaagttactgctaacgagagtgtcaacattttggttttcatgagactaagacagacttgtgaaaattttactcaaacaaaaaggctcccaacaccttggatattttagggtatcaccacgcctcaaggtaccgagctcgaat

SEQ ID NO: 9452 - DNA, 780 bp, Zea mays
tgagcgcctgagcccacataactaaccttgccagaaaccgtatgtaggataggaggcattggcggtactcctgtggtgacttcaaagccaaagaagctgccaactgggtctctaaatgggcacgtgtctgcaaaccatcatctgtaaccctgaaacagaaactcccacatcagtatgttttgagctagctctgatatgcagtgcattagcttgccacaggcatagtgttcaataatactacagcaatcagaggtgcatgcagacctgctccatataggctttctagccataaacttgcctacatcaatctgcaacttgcctagctctccagcttggggaaaaataaatgagctggcaaaatttgatgccggaaaacaatcatcagcaatccttaaccagcacttcatgctcatgtcaaaaagaaaagcatgacggctggcaaggacaactaagggaaaaccacatcttgagaatttagcagatataacctttactgcacctgtaaacatggcaaagataactactaagcaccaactatttcagcaaacactaagatgcagcaaagttcagaatcaccatctcagtctgtacgcgagaactaaagactggatgtacaaatagttacctgcatgatttgctgatgactcatctggagatgcaaccaaagcagccaatgagtcctgcaaaatgcaggtcctgttatggaggtcccatatatacattaaacctcttcttgtgacaagaagcaatttccagcagtcatcacagtctataaaaaca

SEQ ID NO: 9453 - DNA, 866 bp, Zea mays
tccctgtaggccgactctagagtatccctctgcgagcgacaaatgctaagcatcatatgtggagatcataatggcggcggctttgttatgcagacaggaaggaagcctggagaaaacacagacattgacaatccatcgtcagaaggcctccaatcgaaatatggttttcatctccttttgaatttgcatagcattacaaagctactaacaagcaaccacaatggttgggctgcgtccaaaagtatgagcaatgcccccaagtatgcggtttctactcgctttgctgctaagaagtggggcgcacaaacagtgcagcaccacaagattctgtgcgtgtaggacgaacttgtgcaggccaagtatacggaattactaacaagttttttgttgttgttactttctcgtacgaggagtaaaaaaagaaataaagtaatactcggaaagaagagatcttgtttggacttctcggccggcggcagcattattgtagtacaagtggggtatctagtacggcgaatcggacgaaatcgaaaccgagggcggaaggaaagaggcgcgggttttggcaggaaagcgaacctggcgtccgtccgcgccggccggcggacggagctgaataataccgcagcgccggtgctggtatgttccggttgcgacggagggggagcgggccgagcgatgagccaccagccgtgccccctgcccgtgggtacggcggcggcgtgggaagaggagggggcgaggagcggagcgcgtgggcaggcaggcgggggcaggggaggcaggcgcgcgcgtttatatgcgtgaggcggagggtgggggagggcggaagtcgtgcgctgcgcctgcgcggcgcggcaatgtca

SEQ ID NO: 9454 - DNA, 799 bp, Zea mays
tgctgctaatcactggtggagagaaccgtagcatcgcaattatgcccccatcatctccccccgtgtcataatttaattccgtggattccgctctaatgacggccattatagctctgttttcaccgcgaaccagcatgggtcgtcaaattgcaacctggatgacggaatggcgtggccagtttccccctcaatcccctccaattctcccgggatcccggatcaccaaatcagctctaacggtgtaagctgggacgaaccagctgctgctaatcactggtggagagaaccgtagcatcgcaattatgcccccatcatctccccccatgtcataatttaattccgtggattccgctctaatgacggccattatagctctgttttcaccgcgaaccagcatgggtcgtcaaattgcaacctggatgacggaatggcgtggccagtttccccctcaatcccctccaattctcccgggatcccggatcaccaaatcagctctaacggtgtaagctgggacgaaccagctgcttctaatcactggtagacagaaccgtagcatcgcaattatgccatcaacatctccctccgtgtcagaatttaattccgtggattccgctctaatgacgaccattatagctctgttttcacagcggaccagcatgggtcgtcaaattgcaacctggatgacggaatggcctgaccagtttccccctcaatcccctccaattctcccgggatcccggatcaccaaatcagctctaacggtgtaagctgagacgaaccaggggtaccgagctcgaat

SEQ ID NO: 9455 - DNA, 819 bp, Zea mays
attcgagctcggtacccctgattctgcaccgaaggcgagcggagcagcgtcggcgtgcgtgggtcatgggtgtgcgcgcggcgccgagcgggcagacggcggcgactggttaccgtaccgtcactactatactgcactgcgcgcggcacgacgacgtacgtacatacctgggggtccttgacggggtcgacggtgcagggtgacgcgaggtggaagacgcccgagcacccccttgccgcgtcgagcagcgcggcgccgtccaggaggtcgcagcggaagaagctgaggcggccggcgccggcgccggcggcgagcgcgaggaggtggtccgtctccgccctgtcgtctgcatgcacaccaccgcggcgcactcgatgagctgagcgacgcgccgcgtcgcaggcgggcaaggggccagcagctttctctcccgggcccgtcattattcatggcgacgcttgttcaggaggagaggaagcaaagccggcggagagtgcggggctagggctactgtactctactgaccggggtcgaggacgccggcgcggacgttgtagccgcggccgaggaggccgcggacgagggtcgaaccgatgaagccgctggccccggtgaccagcaccgtctcgcccttgccttcttccccgcttgccatctcgccgtcgtccgttcttccgatcctctgagctgaggttccgacccgtcggggggtgcgagtgggaccgtggagcgtggagacgtggagtggctacggtacactcgatctgtactagggatgcggttggtacccgcctctcgatctgctcaagtcacgtcaca

SEQ ID NO: 9456 - DNA, 838 bp, Zea mays
cctgcggccgactctagaggatccccctgattttactgtaattagtgacatgaatgagtatatgagaagcctttgagtgtgaggcagggaggagcgttgtagttgaatacgtttagatcgatacatttcaccttatcagtgccaagcaatcatcattgatatagaggaaggctttgtcgaatcttctgcaaggtaaaaaaaaaaaaaaagatcctgtcttccctcttatttctatttgttaacagaatcacttagatgaaacttgaagcatttcttactttagatggatggtgcatgcaggctctttgtaagacattgatggatgttctgtttcctggaggcagagcaacagctaccatagagccaggtgcagcctccagttcattgtctgcaaatgttttatacataggcgaagaactgatgtcgggttgtcatggaaaaccctaataaacttatattttgtagataagcaaatgtacaagggaagcatgtgagttttttttttgggtactcctgtcccagaataaactgcattctgcagttcaaaatttgccccaaaggaatggcccatataggtttgagatctaatgcactctagtctagcaggtgtaccagcttactgtatcaacaaaaacaattctgacttgtcagaaaaaaaatccctccgtccggagtatgtaccaaaggggggaagctatgtcatgtggttgagcaatgttggtcaactcgttctggctccgagtgttgtatagcatcagactgccctgatgaacagcctattaaaagactgcactgatgattcttctttgttgtatcgtgatctgagtctgaaaaagca

SEQ ID NO: 9457 - DNA, 797 bp, Zea mays
tgaagtttgggtattattctaggttttgcgctttcacagtaatgttatttaattctaccttgctgatctatcttcatctgattctggttggcaggtagcatctcaaaaaacggatgttcagatttacgatcctttttttatcttgcgattctcaatccatactcttcacatgggttacattgaacctgctgaatttgcccgactagggcttcttgcaatcacacttgttagtatagcatctcctgataatgaattaaggatgttgggctatgagtgcctaggaacattcaaaaaatcccttgaggtacctgctgtttcatgaatctctaaattttacctggtttattatattcttatcaactactagctgcttatattggattttctgtattacaacttatcttcgctgggcgaacatattgttggttaatgtgtatgcttgtatcagtatgttcaaattctagcatttgttaaaatgtttatgtgcttatttaagtatgttgaaattcctgtagtttaaatatttttaattttttatttgttaatgatatccacttgtgatggcttttatgcctattgacttgaatggcagcataaaattatgcctattgacattctgggggcattcctatgacatatagatctgagtgcaaaaagcacttgtatggtattctgtatttgtaatcttttatccttctgtgggaaacgtgtctgttattttcttgaaaaatccaaccacttaaaatgtacttttacatatttacagtatgctcagagaagtaaggaaacctggcagc

SEQ ID NO: 9458 - DNA, 794 bp, Zea mays
tggccccttttgttctttcatcctgcataaattattagctttctatttttctagcccatggacaatttttcgctgtaggtgttctttgttgtgattgatgatttgtaacggccatcctgattacaccgtagtttgtctttggttactgcaccccttggcacataggcaaaaatattgtcatttgtagtttgaggactaaatttgtatatcacacttcaggtcctgctgcgaatcttgagaatggagatgtttctcttctacctggaagacgcctagttgttcccttgaatatctgtgttgtgcagggcatgcgtcttgtaagagcacgcctgttgtccatggaaatacctgctcgatttactgaaacacacttaaaacctgtcagtggcaaagacatgaacttattgaaggttgatccctataaaggaagctgggggctccgccttctggaacttgagcttttcaatcctactgatgtcgttttttatgttgatgttgctgtgcatttggatgacacggatgtggaccaagaagtaatttcagacggggatgctgcttgtcacaaaactagaattgatcgggactactctgccagagttctcatacctcttgagaacttcaaattgcctgttcttgatgcttccttctttgtaaaggcaagtagtagtgatgaacctcttggatccagggccgccgccatagcagaaaggaatgccaaggcagagctaaatgcgtctatcaacaacttgatttcaaaaataaaagtgaaatggcactctgggagaaatagctca

SEQ ID NO: 9459 - DNA, 847 bp, Zea mays
tgatccctttgggctgggcaaggcccttgctatgcatgtacagcaaagaggctaggctggaaaataagctcgagtctcactagtcggctcggagcggcttgtgagcctcgagccgagccatccttttgggcttgttgctgtagcaagctgagccggctcgtttcgtcttgtctgtgccaaattacttaatatctagaataataacggatattagataattttatagatagtcagtttgttctttagcgttttatgatagatatataacaatttataatttagattactcacaatgattctatatttttcgtatttatatattaataatttactatataatataattatatatatgtggctcgtgagccgccaccaaactgaaccggctcgttttcagcctcaaagcaggctctgaacaagccgcacgtacgccggcgcgtggcgcggcgcgttccacacttcctggtctgctgcccgaagcatgcacatcggcggccaggcccaaatcaaccgcgtagccatccgcggccaccaaaaccagcacagaatcaaaaatatctgcctgcctacctaccgatggccgccgcgttgtagttgtagtgtaacctagccacacgacgcatccgcggttcatcggcctcgcaggaaacgagcgtcgagcaaaaggtcgaattctcaactctcaagcaccagcaggaatcgagcgagcgagcgagcagtgtccgccccccatggccatggtcgcgtccacctccttcgcgtaccacaaggtaagcgagcacggtaagccgcgcgctctgtgatgtgatgatattcccagatcgaacagctagcgtcgttgctgcaa

SEQ ID NO: 9460 - DNA, 760 bp, Zea mays
tgcaatggaaggactagaatcttccccaggatggggatgggtcacatcagcaccaaagataatagtagctacgtcactgacaagggggattctccttgccaaagcatcaacaagcacagtattccttcccccaacctgaaaatcatgataactttaagaggagaatcggtgttaaaatcaaatgtttagaagagttagtccagttacataccttcacatttattttcagggcaacatttgcaagatactgctgcttgttcaccttgaaaacatgtttagtcagacagcattgggagaccaatccaagattagtctcacatatccttttgacatcccctgaagaatgaaaagaaaattaatagcaaagcttattcattgagcaaatgcccaagaaccttttggaagaaaacataccgtaaagagaaccattattgtcaggcagtataacaatcagcaagtcgagttctcggccctgaggcccgagtatgttcatcgcatcttgatagcgtccctttagtgctctttcaacatgttcaggccttgcatagcaaggtgacagcacaggttcaagtacaaaatcctaaaagagagtaagaagagcaaataacacaaatgaaaatcaaaatgacaaacagatgtatattcaagttccgagtgacacgcataccattcctgatacttggcacatcaaagccaattcatgacagaaacccccggcagcaccatcttgcacatttcgtgagaagttaatgcatgccca

SEQ ID NO: 9461 - DNA, 825 bp, Zea mays
ctcggtaccctgcaaaaaaaaaaaaaaatgagcactgggtatgtgacagggggggaagttatttcgttaagatataggcacaaaagcagggctactttgtagcagtgaacatgtaaaacacatgacaggcagtcataatttagtactggaaaagtaatacaatgtgtaactagctaaggattgtaaacatgtaagtgaatggactatgaagccagcgttagaatcaatcatacatgaccatactacatagtgttagtcagttttgataagctagaatcagggctagacatatgattaccttccccatgtactctagccagaatagatagggtatatgagttgattaggcaaggatcaatctgtgattgggtgtttctataaaccctgtgatccttgcctatacatgtgtaacccctctaccctggtattcatcaatcaatactattctagctacatttctacacatagtaacagtctgcatggtccataacctagctaaccatcaaagaaaacatattctgggactagtaaggccagaaagtggttacctgcagcttctccaaagttctagagagggatgaaaatatccagatgataaaggtagcatcaagtacagcaacaggcaacactaggaatagccttgtctttccagagaagtcattgatatttcccagattttcaacaagttcaagagcttctgaagcaacaaaatagatgaaaccaatagcagcaactcttgatgttatgccacccaatgtgggtagaacaacaccatagcccattgaaactactaatagaagaagccgagaaacagtcttcttcaca

SEQ ID NO: 9462 - DNA, 807 bp, Zea mays
ctcggacccctgacgctgatatattgagagcagcttagtgcatacatttggatgatggcgatcatgaatacatcattaaactattttgttgacaagatgaacacttatgccccgtttatttcctttcattttgaggaattggaatcttactattgcattaggctatttttttagaatgtgacattccaccactttccaaagttatcatataagcctaactcaaattcatggggtgagagatggaaattgattctatagatttacatgttatttttctgatgtacaacttatagcacactcttctatttacttcgttataacataaatatagcatataactatctctttcatatgatttaagataatatacaaatatattacatatataaatatatgaacttaattagttttgtctaaattataaatattaaaatggaattcaattctaatgaaacaaacagggccttatggatattctgagttctgtactctgatgccttccctgaaagttttcatgtttcgagattcatccactggttaagcttttggagtgatacaacaacaggtttggatcattcatgttcgcatcagtgtgctgtctgacctgctgtgtaatgaggggaaatttgaggattctgagaggtattcctgtcaaatggtagagctgggggcaaaagcccagcaatgttgtatttcaaagaataaaaatacttatgcagattgccaagcatgaagaattctatttaactgtaaagatggtacaatttgattgacacggatgaaaccaggtctagtatggtgacgcaa

SEQ ID NO: 9463 - DNA, 813 bp, Zea mays
tgcttgctcttcagaaataccattgttatcaacaatgaccttgaccaagctgcggagttgactaaagtttccacgaaaagcatcagcaagttcttgacccatatatggtgatatgttattcaggagcttgatggaattaatgcgtacttccctttgaggtgcttcaacaaactgaattaaactgacaatagcacctgaacctttgatagcatcaactatattttgtacagatgtcgaagaatcagttagaccaacgagaacctggagcaacttacactcaattgcaggtcctgtgttgcttataagatgaagtagattgtgaacaatgtcttcagacactaaggtctgcctattatgatcaagtggaatggactcaaaacgtgcacccgatgccacaacatttgcaagaatggtcgctgagacctccttcaatctcataggaagctgattattgccaacagtaaagaggtctgtgatgagaggcggaagaatacctgcttcaattaatatctttgcactagcatcataagatgaaatttggttcaatgccttcaaagctgcttctctggcctctctattcccttttttcatgatattgactagtgtggaaccagccttttgtgccacaagtaccttaacatcattgcttaaaacaagctctccgaggtatgcagccatagataattgtatgtcaggtgaacctgcaaatagcacacaataagggcagctccagcgttgttactaatgtggttcagagaagggaggaaagtgctagccaagatttttttttttgcaccaaagctagaataagca

SEQ ID NO: 9464 - DNA, 701 bp, Zea mays
acgaattcgagcctcggtacccctggccgtcaccggcggtgccgtgcctcctccgaacaacatctccctcgctgacgagctgggctggttcgacgccatgaaacccgcgctctgcggctcaccccaaggtacgtaaccgatccggccgccgtcgccgtttgagacgccacatacgacgccatcatcctatcatcatcacattgccgatgcatgcgctctctgtagcatgcaaggactacttcgcgaaggcgctgttcgtcgtgggcgagctgggctggaacgactacggggtcatggtggtcggcggcaaaagcgtcgccgaagcgcaatcctacgtgcctcacatcgtcgcaacaatcgtcgctgccactgaggcacgtataccataccaactgtagctgacatgcatgcattgtgcttaattgtgcatggtccatatatatatgccctcacgatcacacatccacgcaactacgcaaggcgccgatcactcacactccacctctattgccgtcgtgtgcatgatgcatgcagaagctgatcaacgacggcgccacgacggtcgtggtgtcggggatctcgccgatgggctgcgcgccagggaacttggtgctgctggcgagccaggacccgaccgactacgagcccgacacggggtgcctcaagggaatgaacgagctatccagggaccacaacgcgca

SEQ ID NO: 9465 - DNA, 857 bp, Zea mays
tgagttaggctctccctctgctgcaaaggtgtgcaagcttctgggtttctgtgacgagagagagaatatttccttcacggatgcaagaagatatgctaaattgtttgattcacctctttctagagagcatattaccgcgctggtagccctgttcggctgggaggtgcccccacctgggcagtcctgagctgtgcagtttggtggggctggctgttttttgtattttttcatggattcaaatggtattttaatatggaatgtgaggggtctcaatgatcgtgctaagagagattctattaaatctttggttcttgacactatgccttctattgtgtgcctgcaagagaccaagctgtcatccatctccgattttgatattattacaattcttgggtcggcatatagtaattttatttttagcccagccattggaaccagagggggtattcttgtagcgtggcgggacagaaacctttccactggagtttctgtcatcaaggagttttcggtgtcagttcagtttcagttgctgtcaggtcaactctggtggttcacaggtgtttatgggcctcatcaagataacctcaaacttgcctttcttcaggagctcggtgtggtcaggaatgaatgtgaagggccatggatcattgctggggattttaacatgatttatagagcagaagataagaataattccaatatcaatcgagctttgatgggagatttcagaagctggatcaattctctggagttaaaggaattaccgctttgtgggaggagattcacctggtcaaatcagagagaagatcctacccttgtcaagctggatcatgtaatctgcactaagagggtaccga

SEQ ID NO: 9466 - DNA, 924 bp, Zea mays
  unsure (1)..(924): unsure at all n locations
aaaaaaaaaaaaaaaaaaaccctaatggtgacactgcgcgtcgactttagaggatccccctgcatatgctgtcccatccaagccagaacctgaccattcatcaggagagaacacacggaacccttccatctacatgtgttaaagattaccaaaacaaacctcattaagaaaatttaagtgagtacggcaaaacaaaagtacctgatggaagacaggatagtgagttgaatcaatggaatccctacggtaaacatctccagttacaagaaagtgtgtacgtccatcccttagcagctcagcttgatgagcactggtatgacaccttaagactgtttgatcatcaacataatatgtgtcattgtaactccggcttacatggtcagaagggaccaagacatcatcaaaattctgcagcgaagaacatttataggtcagccagagaccaaaaactaccacataccattgtccctgaagatgtacgaatctgaagaacaaacacacagcacatccatgtgacaattcactaatatcagggaagaagcgatgagagggaagtgatgagcaatgctataccaaattatacattttaccagtctttcttttcatccttatccaccctagcattatgtactgactagctactggtactttgttaagggtatactgctgctgcagttgatcattagcagaagcagaatagcatatatccactaaatattactacatgcaatttgtacctcatacctgcttgacagaaacaagggggcaaaggtcatcaaacttgtcaaactgtccagtgaagttcttgtcaaagtaatcataaattgtgttcttcagaatcccaaggggatggttctccctcctgtgcagaggatctatagagtcgggtgcagcgataatgcaattcaatgggggngggggggc

SEQ ID NO: 9467 - DNA, 790 bp, Zea mays
atacgacttctagctcggtacccctggtgctgggctccgcgggcgctcctcgtgcgtgacacgcgcccgatgcgtcaggatcgcgcggccggcgcccggggcctgccgtgattctgcggggaggctggatctcggtgcttccgcgtgcgggaaccagtgagttttctttttgtcttctcttccccggcggctagcggcgggccgcttggtgcacgtcagcgcgggaggccggaggttagccgatctggtgctctcgccgcccggagaggtggtgctgggcccactgccgggttctgcttagtaggaggcggaggaggtaagtccctcgtctcatggggctcgcgccgccggagctgggccagttcgacgggtgggagagctccggggaggaggagcgggagcgggagcgttggggctggtgccgccgcagccgccgcggcagcagcaggcgccgcgcggcccccaagggcaccgacgacgacaccgcggtcgacaccggctgctgcatccgcctctggcccgtcgggacatgccctccgccgccgcagaggtccaaggtcgacacctccaccagcagcgccagcacgcacgggggtagacgtctctttctctcctgtcacctggatactcactcgcattgtgctttctttgctgtcttgctcgcgtggtagatgggatttgctcctctaagtgaccataattgcgacgccgtactgttagccttgatctcgttctgggtaatgatgttacgcacgtcgcactttatctcctgatgtgagctgcaggggac

SEQ ID NO: 9468 - DNA, 807 bp, Zea mays
attcgagctcggtacccctgcttgaagctgtaagtgtcagtgttgctgtcggagaacatctgcttcgagatgccccccaagtctttaggcgctgctgctttctctgctgtggagttgaggttcctctcggccatcgggcttctcgagtacgagttctcttctttcatgccgtgctgcttctgcagatggtcttgggcaatcttgttgtcgacatgctgccgtgctatctttctttcaactaggagctgtgattccagctctttgatctgcagagagtttagaagtagcgatcagcatgtaaacttttttattccgattccagttttcccatgcacactaaatcagttaccacatcacattttgcaaaagcatcatatatgcaacagcagcagcagcagcaaagccttaaaagcatgatatataagaagagaaaatcatatcatccattttcttgattaaccagtctaattgaaatttaattagcatttaattggttgtaacatggaagttaattgtatttattttttatattgctggttggtctactcaatcaattttgccggcaaggtgcactagtgccaactatcatcattcattgtcacatattttacatttatgttacatatgaaaatgataagttctgttaagttgcatctaagaaaaaattgcaacataaattgtgtaggctttgcatgagatgttgtatccatgcttaacattagctactaagcaataattcattagaaatcgcagacatgtgacattggaaaaaacatatagagcttgttcggctgccattttcatcca

SEQ ID NO: 9469 - DNA, 790 bp, Zea mays
tgcaagaaatggttgaatgtggggcgtttcctgtgctcgctgtcaaagctggaaaagtcaatgattacagtgggaagtctgttggcacaatttcttcatctcaactccacataaaccctgatcttgctgaggctcattctctcaggcagtggtttgattgtggaggaagagatgcttctactcagtctatatccagggattttactccttcagcatcatggaatgaggtccgaaagacagtagcacagataaaggatgatggtcttggaatgggggacaaacccgattgggtcacggtgaaggctgctatttcgttcatcaaaaccgattccttctgctacacagcttgccccaatgtgattggagacaggcaatgtggtaaaaaggtgacaaagtctgattcaggcaactggctatgtgacaagtgcaatcaagagtttccagagtgtgattacaggtatctcctacagttgaacattcaagaccacacgggaacaacttctgtgacagcatttcaagatcgtggacaggagatacttggttgctcagctcgagagctcaacatttttaaagagaacaaagatcctcgctacacagatgtcttgatcaattgcttgtatcagaactatttgttcaggctaaaagtgaaagaagaacaatacggcgatgtacgacaagtgaaaaacactgtggccaaggtggagagggtggatcctttggctgagagtaaatttctgcttgattccatttcaaggtttataccatgagagttttgttcttacatctatca

SEQ ID NO: 9470 - DNA, 770 bp, Zea mays
tgcatacctccagcttgatcttggtgttgaccttcatgtcggagaggtgaaagaagacgaggatcagagggctggatctgcaataaagctgggtactaggaggaaaggacggcgtcgagggccatcagaagccctcgcaggcagcccgggctgggcagaggccggccggcggcgacgcggtggaggacgtacggtggtcggaggcggccagcccaggccaggcgtgcaagggagggacgaggaagcctggaactcccagcgggccggtttaaagacgcccgggtggcccacgtggcagcatccccagccgctgttgtacacctacggctcggagggtagttcgcgacggttatttcggttacccgctgctggcataggctactttcgaccacgcgacatcgaccatgccctggcatggcaaaaacaaccttttttttgtttaaataaattcattgacagcttatttattcatgtaattataataatagtagtcgtgtagtagtagtctagtagtagagtagaagaattgttaagaaatgcattcacatgtcggtaggtcacatgcggtcggatggtgagagcctgagagggggtggcagcacagcaccatggcgcgcgcttcaccgtccgtcccgacgcgtcggtcgagtactcgagtcgtcagcggtcggtcagcactcggcacccgattcttccaaagccgccacttatgtcctcgcgagcttggttaataacgccgcgtgagctgggtgtgggtggggagtttgtca

SEQ ID NO: 9471 - DNA, 771 bp, Zea mays
acattgctcggtacccctgcagcaagcttcaaaaaaggaggtgcgcaaattattattgacgtgtttttcatacataaaaatactgacaaagactattatagcccatcgaaccagaaagtgcttacggatttgaagttgacacaagaaggtccacaaaggtatgggggtcatccagctctctaaaagaagtcaactgtttttgttagtataacaaaggtagaactaatatgaagagtttagaagctatgggcatccagtatccacctctgccagcgaaataaagcatccccttttacttctgttccactgtttctatcagcagcagcagacacctagtgacattaaggtaggcaaaagctttttgtgaagtaacaaaatatttaaaaatggatgaattggaacgaaatctcctaaattgcagcagctataatcagtggctttatggacacgcgattgcactaaaaggcaccatttcaaagtctggcacaaggttatatgtaatatcaacaaatatatatgtgaagacctcagcttgtggcactatgcaacatccagagaagactgttatcataattgaaaacaagcatagggagcatcaacagattgtccttttccagaagagaagccaataggccagtagatgttttaataacaatggcatgctaatgacaactagagatatgaattggtgattcttcgaaagaaatataaatgaaaaggggtgaaaatggtagcagcatgaacaaataaaaaatctgaaaatagggctca

SEQ ID NO: 9472 - DNA, 768 bp, Zea mays
ctggtacccctgaggaatggtactttcctctcggcagtttatgtcaccgaacaagatgagcatagcagccccaagacaagaacaagaagcaactgttgagcactattgagctggggcatctctgagaactcaaactgttaatcagcaggcacgaaatgttccccagaataattgacacttaaagagcatcacttgccatgttaatttatgctccacgagtaacaagatgcttcggtgtctatccaaacaagatattatggtgtctgcaacaccataagaccacagttctcttcaagatttcaaacatgtagggaagttggccctatggcaacaactccaagcaagttcccaaattccaatcaatcctgcagtgagttttttttcctggagtcaattatctcgtggattatccgaaaatcatacagatgcttcttgcctcatagtttatcctcaagatatatgtgtttcaccagcagcctctgcaactgcaatcacctttcttaattgtgtggtacctattgacatcccgtactacaattactctgtcgatcaccatgctagcatacttgaagaattcatgacaatgagcacatattctcaagttcttaactattctcaacacctttcctgatggtgcagcaccactgatcaacccatatgcaagagccaatctttcactatgatgccaaagtctctcatctgcctccttgtaccctaacttctctacctcttgaatcaattcatgcagtttgtcatatatttctagca

SEQ ID NO: 9473 - DNA, 1052 bp, Zea mays
ccgtacccctgacggcgagcctgttcgcggactcggtgtgcatcggccaaacggagcgtcgacggcgaggactgcttcgtgctcaaggtggaggcggaggcgtccagcctgcgcgcgcgcaacagcggcagcgtcgagatcgtgcggcacacgctgtggggctacttcagccagcgcacgggcctgctggtgcagctcgaggactcgcacctgctgcagatcaggtccggcggcggcggcggcggcgggagcatcttctgggagaccaccgtggagtcccgcctcggcgactaccgcgccgtcgacggcgtgaacatcgcccacgccgggcgcaccgccgtctcgctcgtcaggttcggcgaccgccagcaggacggcagcagcgccaggacgcgcatggaggagacgtgggacatcgaggaggtggacttcaacatctggggcctgtccatggactgcttcttgccgcccagcgacctccgggaggggggcaaggagagccaggacgtcgccgtcgccgtcgccaaggccgatgcgcgacccccgccgataaggatacctgcagtggccatgcgcgtcgggccctcgcaggtggctgccgtcagcatggacgactcggactcgctcatcgcgaggccatgactactcctgccgcacgtacgtacgtacgtgcttacagtgctgagtgaagagcatgtatacgtggcacttgttagttgttactataggatcatacttgtcgcaagatctgtaaatatattgcagtttgagatattttcccccttcgagaggtgtcaggtgtggatttacctcagctagaattgaggccacaagcagtagtgagtaatccgaactagatgttcggcgtatagctgcattgtaaattctaatgaactagtcctgtaaatctgaaagaaaatcccagttcttctgcccagtcacaatactgaagtacgtaatttattttcttcctgctcatatgctccagctattcttctctatctgacagaacaatttgaaaccgcgacacaaggggagcctctagagtcaac

SEQ ID NO: 9474 - DNA, 814 bp, Zea mays
tgatggtccatcagatggttcggtgcctgataccatgcaagcccagccaggctggcacccgagtgcccatgagttttggttgcagttcggacttatcctgggattactgcgactgctagcattagccaagctttcgatgtataactctatttcagcttgcccacacaacattgcagtcatttgccctgcacagataaccgtcattatgaaatattcatgaacatctgctataagaatcctaacagacaggagtgtagctcaattcagtctgtaatgaaaaatatgcacaatactaggcatgttccataatactccctacattcgaaattacggttcactttagctttgtcctaaatcaaacctctagattttgatccactttttagaaaaagtatattaacgttcaagtaaatatttagagaacttacaagctagagaatcaaatggaactagttcgatgttacaaacattagtgcatttcgtataaacacagttagaaaaaaaaaaagccaaagtgcattataagttggatgaagggagcagtaaaagaaaaaacggtagtactagttgaaagagggtagaatcttctatcagcgtttttaatgaaagctgagtatgggtgtcttcctggtaaccagcaactcagcataaacaaaaatccgaaaccaattacatacttttgctgagggcctaatcccctccatgtttctacggcgaaatgaagatgaataaatcctgcaaagtgcaaacccctcaagcattcgccctgggagttcctcttcttttaatcctaaacagggggatcctctggagt

SEQ ID NO: 9475 - DNA, 839 bp, Zea mays
tggtgccaatcgatcgtgaatcgtgatggcggcgacggcgaggaagctgatcgtggaggtggtggaggcgcggaacctggtgcccaaggacggcaccggcacgtccagcccctacgcgcgagctgacttcgacggacagcgacgcaagacgcgcaccgtggccagagacctcaacccggcgtggaacgaggcgctcgagttcgacttcccgcccgccggcgtcgaccccgtcgccggggagccgctcgaggtcaccgtgctgcatgacctccgcatcgggcctactcgccggaacaacttcctcggccgcgtccgcctcgacgcgcgccagttcgtgcgcaagggcgaggaggcgctcatctacttcccgcttgagaagaacaagggcctcttcaacttcaactgggtccgcggcgacattggcctcaaggtgtactacgtcgacgtcccgctcgcgccaccagagccggagccggagccatccgtcgctcctcctgatgcgacggtggcggaagcagcagcgccgccgccgccgccgccgcctgatgctactgctacggcttccgcagatgagcctcccaaggccgaggagccggtggacgcagctccggcgccgcaaccggagccggcagaggcatcagccggtgacggagctaccacggagaagccatcggaggctgattccgcaccggcaacgctggcgccggaagacgcacaagtaatgacggcagaggctgtggcagcatcggaggagaagccgccggaagaggagcctgtgttgagcccgccaccacagccgacgccgactctgatgccacggcaggtatcgatgcctgtac

SEQ ID NO: 9476 - DNA, 789 bp, Zea mays
cgggtccccggcctgagcagtcaaacttataggcacgcgaaacaactactcatatccgagccgtatgccatacgcacgagtggggaacccatagtacactgctccgaaacagtagcttaaattccgaccgtgttacggcggctagttttgttaccgttgcctgccgtgccgtgggacgacctacacaagacacacgagacaacataaatgattgtctcgaaggttcatcatcatcagaaattcgtaattcagaagataaattctaaaaataatgttaccgagtgagtaagcaaaggataaaagtaatgctagtgtgtgtataaggtcatgtacaacccatttaaaatgtggtttcttgacgggtctcttagcatctacgtgaaaaaagagattgactcttcgcgaagaacacgtctcttcactcttcacgactctataaatgttgtctcttagctgcatttattattcagagtcttagaattgtattatgcactcttttagttgtctcttgtattttaaaaccggactagagtctcagagttatatataccctaatcttatacctagtgatgtatttattttagaataaatttaaaactctaaaaatgcaaacatttgtttatgtgtccgaatgagtaagcaactgggaagagcgagagggataggtggggagggtggcctattaatgacggtggttactgggggacgctcaaccacttggaattaaggaggcacaggcacaggtggacgcgcgtacaggatccgctgggggatcctcgagagtcgacc

SEQ ID NO: 9477 - DNA, 780 bp, Zea mays
agttgcattctccctgcgctcgactctagatgatccttctgaaactgtcatgctgctgacgactcaactatctatgtgaaagatcagcttaaagagatgctactgtgcacctaatgtatctgtatcactaaccagttctatcttggatgattggttctgaaattcataacatttcttaaattatgtttgttttttgttttaaatttccaagaatactgtaaagagtcttattttagtgcaggatcgatcgtacatacactcgtattgctggatctatgttcaggcatagtgtactagtagctcaaatataggaaaatgcttatcctctagaaggcgctgaactacccccccccctcctccttgtgtccaggtcaatctattcgctgtgactccgtgtactccggttttattctacttttgagcaagaatgagcgataatgaaacgattaattattcctttgatcttccttctactaacaaaattacatgtgccgtgtttgcacacgattttattctagttcgagcatgcttcacagaaatggctattgtacttgtttactgcatggattcttctacatacatttatgcctaataacagagtaaagtcgatggacgacgcagtcagaacctcaggtcactatcatttggaaattcaagtcctacatcaccagcatcatatgcccaaaatggtcttggaaactatggtaatgaagctttttatctgccaaacagtccatatagatctcattcagctatactcacagattatattgtttcatc

SEQ ID NO: 9478 - DNA, 839 bp, Zea mays
actctgctcggtacccctgcgcctgcgccagcgccacgcacgagcagggctaccgcacccccaccgactccttcacaattcactgtgagcgcccccgtttgaatccaaccctcctctagtccgctccccactctgaaatcgacccagtttcgtcgggtttgtctgcaaacggacacgacgggacctgttagttaattttttaggtcttgttggccccgcggcccgcgccaagtacatcgccacgccatggatggtgggttgttctgggtccaatggaggcagaggacaagtcaggtcgcagagagctaggtttagcggcacgtaactgtcaaggccccatgatggatgcatggattaattgttaaaaccatcatgaatgctagattgagtattacgtagtggcaactttgcactggagtacatgtaaacgagcatgatgcccgcgtctgacttgcaagccgcgcgcacaatcaccaggcaggcgacacgggcgggcgcgtcttttgaagaagaaaaaaagaagaaagatttgggttctacgtgtttagatagtggtgcggccagcctgcccaagattctactactagtatattagtcatatagtgcgtgtataatcttcttcgtcactcgctctccaattttaaacccggccgatgaacctctcctgctgtcgtgcaggtgatgatgatgaccaggccttgagctcgattttctcggcgggtcccgcgccggcagcggagagagcggcgttccagcagcaggcccccgccacagaggcggagcccctgcccagctcgtcctcctccagggggatcctctagagtaggccgcaggcaaca

SEQ ID NO: 9479 - DNA, 792 bp, Zea mays
tgacaagtgttaatcactcatgctgaccaacgacacaatggcacagccgcagaggtcaactcatctccgttcacttagtgccaaatggatgctaattctatggtctggtctggtgatgccaaatcgcgatgctccatcgatgtgacgtagctcgatcattgccacttcgactctccttcactggagctcgtgcaccttgttggcttgttgcgattcgtttatgcaaatatcctacgttgacactgacagaagctaccttagtggacgtgattacatatatatgcttctatgcggcagctcctacttagtactgccttttcattaggatagtaggatatgagcatatgtgcagtctgaaagtactgccttttcagtggtcagaaagtaggcaaaacctaacctaccatagtaaacaatgacaattattaatcgtctttaaccttaatccatgaaaggacacatggtttttgagtagcaaaaccattttctttgagcttttgacatcttgctctatagtcagtctgtcacttacacagttacgtacacttgcttcgtcccttacaggtgtccatgcctgcatggctgcacgacgtgatattcttcagaacccaatcctaacgttcggtgcttgactacctttagaaaaacaataaaatgttcagcactctaccagttttcaaaaaagcaagatgcagtattccctaatatacaggttgaaaattacgtgtaactccaggacgacgctagctttcaaagtttggcaccttgaccattcacctccaggacgacgca

SEQ ID NO: 9480 - DNA, 763 bp, Zea mays
tgcagcacctacccagtccttgcccaaaacgatcataatcggagcccatacgggcccaacttcaacttggcatgaacccaagcagattcagaaattctaaagtgggagttaaatatcacttgggaaatacaacaacatatgtttgtcattgacatgacaactcttcaatcctgaattcagcaacctaaaatttactccctccgtcccaaaataatattcattttaaggtgttagtaaattcgtaaaatatttaatgtatatattttatatatgtgtctagatttattttcatctatttgaatatagacacaaaaatttggtgctaaaacgaacagtagaataaaacggagggagtatttagatacacaaaagggatccatacataaataaatttgtccccgttggtatgcaatgcacatcacgcataaataaataaaatatgaatacatatatgacactgtttttgttttaagcttttatgccctgtaataataattttgcattggtctggttttctcacttgtggtgatgatgcttgatgtccttccattatctaagaaagcgtcatatatattcttaacatatactgcaggcacagtagaatttcgctgacacttttcagtaattaaatactcagtgaaataacatcagacagacatagtgccaacaaacaaaaggaaaattatcaagcaaaacaaagatgcacagatcgaaggtctgcaaaagtagctagaatgagcgaggtttaagtgagaataaagca

SEQ ID NO: 9481 - DNA, 806 bp, Zea mays
tcggtacccctgaatcagctttgagttgaacgaattggcaagctgatttaacgtctcgtcgcatctgtccgatcctgtgcccactaaagtccgggcaatcggcaagcaacccatcgggggcagtccaacaaaaataaatctccttcctccaagcattatcatggcctgagacatatggtatgggctacaagtcgtcattacagagagataacagacatgccgaatgctagtttgacaatggaaatgtgtagtacctgggtataattagcgacatgtgctgtcaggtgattctcatacagttccatactaattgcattcgaccgattcgatgcaaggtagactgaaagcaaatcgtttgtaccagtgcttatcacaaaggcagccctgttaacaagtcgctccgctcttcttggtccaagcagtgttcggataagtagcttgtaacggaagaggttgtgcacttgttcagagaatgacaccacattctatataagtaggaagcttaggtggttagtaacctaataaagagagagctcaatctgagtttgatcttcatcaatcctaccatagctttaccacaaagaaacaactatatgtttgttttgttttaatcatgtagcattattgatatttatagttctgttaagatgacatactattctgttggcagtgctgtcgtcatatccggagccgcctgatgcaaagctcacacccctcctgagctgggccagcctcagatttgggtcaaagaaacctggaataatcctggatatgcctagtttcccagggggatccacgggagtcct

SEQ ID NO: 9482 - DNA, 799 bp, Zea mays
tgaggatggtgatcaaaatgcaactattgaaaagatgctaatctcacacacttgccagtgtacatataccaaggaattcaaaagagcaacacatttctgccatgataagtacttacatacttttccaagaaccaaaatcacgtaaaacttaaatatcagttttcctctcaatattttgatttctgaagcactttgagttttaccgaagtacttcactatgcaagttcagcctacaaatttaaccaaaaatgacaaaagcactgcaatgatatcaaaaggtggaacatgtagtccactcccccatcactgaagctgagaaacaaaaactaaagctctaattttgtgtaatcttgccagttgccactatactgtataacacttgagttcacctgatcctaaaaaactatttcctccaagccacagcaagagatcaccgaactatgcggctatttcaggacactgcaatgtaaggatctaattacttctcttgtccagaaaagacttgccaacatttcatttttaccaaagacagcaggaaaacctttctatcaggtgaatccctgcaatgtgactgaatactccaaatgtgcccaaataggacctttaactaacaaaatcgatgatatttaaacagaaaagagttcgatgacaatgaccaatggggttagcaagatgtgtaccttgcatatcctgatcactgagaaactgctcgcaggcactagcgctttcttcacaatggctctctgctcagcaaccatctcccagcagagccgccgcgccatctccctggccatcacca

SEQ ID NO: 9483 - DNA, 783 bp, Zea mays
tgcaaaaattggtgatcatttacaggtaatttctgtccggtattgatacccataatttttgtatatgttagacgattctgaggttatggctttactcttcggtttagttttttttgttgattttatgtttaatgtctacctctcttgtctgtcagagcgcagaatcccagagggaaactgctagtcagacgatcgatctcatcaaggtaacatatttattgaagtttggtactactatattactgtttgcttgatatgtttgtatgacctcattttaactgaaattttgaaatatgcttttattacagtatctcatggagttcaacagcacacctggggaccttatggaactttctcctttattttctgatgacagtcgtgttgctgaggctgcttcaattgcacagaaattgcgtaagctctaactgagctgactgctgccattttatttctgtcctgttagttatcaatcacgtcgaccaattatgaggaaatcactaagttgatatgtgcattttttctacgtttttatgccgattcttgattttttgtgtgttttagcaacattagtggacatttataatatctaagcagaattctgtcaagcaaaagtagtaacatactaacattagcattttcttattccaacatgatctcaatgaaaattcgtgcatttgtaaatttaggcattacatgtttctaaagtagctgtatgttttgataatgtagggtcatttgactgaggcggactgttcgtaggcatcgcgtgggacaaatttctcc

SEQ ID NO: 9484 - DNA, 826 bp, Zea mays
tgctggttggcggcgccgcgggagtagagctgcgcgaggccacggaggaggagcggtggcggcttctcggctcgcggtgatgggtcgcgggggaggccgctgccgccgccgccgccatccaggctcagcgtgttcttgaacgcggcgatggcgccggcaaagttgcggcccagccgctgccacttcttggggggcgcgggcgcgggcgccggcgtcggcgtcggctcgccggcagcgcgggcagaatcggcgcaggtcgggagggagtcatctgaacgcccgtggggcttcatgagaacgtgctccaccgtctcctcatcggtgctcggccgccccgaccagcactccagcgccgccgccatcgctggagacctaacctttttccccgctgctgaatcttcaccttgcttgaaagatgggaagcttgctgctactgaaggcgggatcgttttgggagattgaaccgagagtgaccagaacaaaacgaggattccgtttttctgctggatgaacctactaattgtctgtagcacactgaaggaagggctgtctacaagatgcgaaggaaaatagcaacaaaaaaaaaaactgtgatgtttgctcagtagtaagtgaaacaactaaaaaatgttgtggtcttgtggcgaatctctgagtgagggaagagtttttttttccctcgctgtgatgtttgttctacattaaaactagtcacgttgctgctcagctcgtacagggagggagggagggagaagaagaaggcagccaaacaaggtggagagggaggcaaagaaaaatgacgcctgcttttgtttttgtagtacca

SEQ ID NO: 9485 - DNA, 829 bp, Zea mays
tctaaggatccccctgcgtgaaaaaaaaacggcactgcaaatgccggagctgaggtgttagcgctaggcgactcactcatttcggtcatctcgtcgccctcatatgaccttcgcctgaacgagagcctgaccacggccgttttcttcttctgctgctgctgctgctggtgcgggggcgggaccgggctgacaccaacgaccggcatcggctggaccttgttgctcggaaccgacgccgggaacggccgcggcgacattgcagcctgaagctccttcagtgtactactgcagcagccctcgtcattattgcagctaccgctattattagttgcagtggcagcgacgttcgagtcgtcgtcgtcactcttgtcagcaggttgttcactttggtcgtatgcttctgcgtttgcgatgctcctgaggagctgcatggtgtccaagaagcacgctgcctccttgcactgcggtgcgtccgagccgccggtgacatcagggagagggtctggattggattgaattgaattggaagggaaaacgtaagtactactggaaagtctgagactgcagttcacgcttttagtttgggactatgaacgtacagcattacctccgctgacgctagcgaaatcgttgtcgagatcgtcgtcggagtccggcgactccaggatgctgacagaatcgtaccacgcttcttcgcaaaccactgcacgtaattgccagagctgtgagcgattactgccttactggtaccaaccacagtagagtccaggaccaggaggaggaggaggaggaggagggagatgctatgctattgctatgcagggggatc

SEQ ID NO: 9486 - DNA, 810 bp, Zea mays
tgaagcagcagcttaactgaagaagcttagttccctctatacatcccaggcccaggtgaagtcaccaaccaatcctcctcatcctcatctttctctctctctcaagcagtttattattcacaacccagtcaacaatcaatccaagctcaatctcaaactgttccctccatccatcacccccaccttcaatcctttccaccgtcgccacgacgccaacccggatcgacgcgaaaaacagagaccgaccaatgcaaaagcaagagcgatatatgcaccttataataatataatcttctatatgccggtagctatcaatcaagaacactactaatctaagcacaacaatgactgaccacgtacaattgtgacggtgaactttgctgtcttcatccagcgcagcagcggtggtggcgaattaaggtgaaagtgatagtgcttctcgctcctcgaggaatcatcggtactgcgcaggtggcggaggcgatgcgtacggcatagggtataccggtggcaacgggccggggtatgatggcggcggcggcggcggcggaacagggacaaacggcttgcactggaacgcggcgcagtcgacgggcggctgcgagtagaacgcggcgcactgctgcggcgtgcgctgtgtggggcggttgggcaggcagttcctcctgtcaccgtccgaaggcacgacgcgcgcgcaggacggcggctcgccggtgaagaagttgtaggagatggtcaggttcttgagccgcgggagggcgcagatggcctccgggacggccccggacaggcggttgtgcgcgacgtcca

SEQ ID NO: 9487 - DNA, 797 bp, Zea mays
ggtttgttctcgaggaccagtttggttgctggttggtcaggcttagcgatagaagaagtgtcggtcttctgaactcgtggaggaagttcttcgtcttcctcttcacgacaaagggactcctcttcgcactcaggaattggggccagtgacttcaaaacagtacggcagatggacagaaaaaaaaaggtcagcaaagtacacaaggcacaattaggcaaggatgtcagtgaggtgaaccgaagtaaattagcaaagagagcgaaaactgaaaacatactagctgtgtcttcaatcgtgcctgcaggttccgatacacttcagacgacgggtttatctcaacgagcctgttgacatcaaacagagctgactgataatccttcagagtgacgagagtctgggcacgtaacatcagagctccagcatgctccgtatccaactcgaggacagatgtacactcttgtgctgcctgcatcagatctcacaaatggagaatttaatattagaaacaataaatgatgtctgtagttaccggatgattccagaggaacgcatactgctattgtcagggccagggccaatacaaacaataactataccccctcttactagctttcgtagtagataatcaattataagccatttgccgtcccttaaatttcaggggcccaaatcaagggaatcatttgagtagggccattcataaatttcaggtaagttttttttccaggtaccgtgcctagcctgttttctagtacttttgctatttttgtaaggcaacggcaagcaaaacataagca

SEQ ID NO: 9488 - DNA, 756 bp, Zea mays
tgcttccttgtattttgtctgtgcaaacaattcctggaatctttgcacaacctgcagtacaattcagaattccatgaaaaaatttagaaacttgacacataagttcaactagtcagtttgtagcctccacaaacagtatagagaatcaacatttgaacggctgcaaggataatggtgaaagaagtttgggaacataatatgtatgaaaagtagtttctatgagaggatcatgaacatctagtacatgattttgaagctccaactttttcagagatactccatcagttcatttttactagacgtgttagactttgaaaaaaaatcaaacttcgtaaatttggccaacataagtcaaacttcataaagttggctgaaaataagtcaaattatgtgcatgcttagttcatgaaagttagtgaatagattcatatttcaattttcaattatctttcactacgacattgattttgtacagttgatatattgtaagataagttggtgatcaagtgtatctcaaaagacttcaccagatcctaacatgcctactgaaagacacatgaaggtggtagtttacaagagagaaaatggggaaaaaaacatttgtgtgtagtgtgtacatttataaatccctgagactttgtgaagctttggtaaaaagaatttggtacatgcatatggctcttgggaatcaccatttcaccaagaagcataagccacaaacacccgtccagcaatgtcaatgatcaagaaaaagca

SEQ ID NO: 9489 - DNA, 933 bp, Zea mays
  unsure (1)..(933): unsure at all n locations
aattcgagctcggtacccctgctgccgttgcggtaggcgttggtgatggtgttcacgttatccgtgtgccgcagcagcagcatttgcatttgctttgttctgtatgcggtgtgcagtgcacggcctggcctgcctggtatcactgccaccgccaccgcacctcacctccttgcattggttattatctatttatttattatttcagttcacgcacagacacagtgcagtgcattcaatctcaaataaaaagccctgctacagtgctagcagtactcggatccacgaccttctccctccctccgctgctgctccgtcaaggaagggaggaaagaaagggcaggggaatggaggtggaggaagacggccgagccgcccgagtgctgctgagctcccagtgtctctgtctctgatgaggttagtacctgcactgctccgccatgctctccgccgcattcctcacccaggcttgctcgcagctactactgttgctttcggcactggtctggctggcggctcttggctgagaaatatcaaaaacattgccgcaccaccgtccgctgcgcagcctgcgctgcggctggatggagatggattccgccccccccgcccgcttccagatcccatctccgccaccaatttagaaatggacgccccggattggccgccccccctccttcccttcattccttccaccaccgccgtccaaggatgttttggtgannactcaatcaaccgtcgaggcgcttcacgttccttccttccagcttccacacgcaaaggcaaagctcagtactctacctgcttcgcatctcagcagcagtgctgtcaggtagccgcacacgcctaagatcttgatctaagcaaccaccaccgatgtgcatctcgcattcaaccatatatttttttggaactttaaaccaccaccgagtagca

SEQ ID NO: 9490 - DNA, 855 bp, Zea mays
actaaaaaataatgtgcaacaagcgggtgctgaaggaaaggtcccaatcccagctcttcaaattgcacaaccccctcattcttgcatatctcaacctccagatcataaaccgttacaatttttcttgctgcaacatagcaatggatgaatgcgttcacctaaaaaacatcaaataatgcccatcaaaagtaaattaccagaatgaacaagtaatttctactgaatagtaatgacttgtgagtaatcaaaggagctaagcaaacttgcaattgcatgctaaataaaattaagccgcgatcctttcagtgaaaatgagcaaacatcaagctgcccctgtctagaccgatcccttattaatgattctagttctgttagatgctagttatgctcttatccaaggtaaggctacctttgggcatataccacagcttaatttttgaaccaagagttgtaatgactcctaatacgattacacgacgggagtatatcccatttgaaactataggtactgagtacgggtccactgagtactgaccttgccctcgattaggaagagatcccgcaggagaggcacatcctggggctggacgccgagggagtcccacgaatcagccttgagcgccaccagcaccgcctgcgccaccttccacgccgtgacgccgtccccacccttcacgagctcctcccgagccttcctcgccgcctcttgagcccggtccagcacggcctgctggttgcccggtggcggcgcaggtttggcagcggcggcgggtttggtagagcggtgcatggtgttaccggtaggggcttggtggtaggcatgggaggcgaagtgatgagcctgctgctgctgca

SEQ ID NO: 9491 - DNA, 880 bp, Zea mays
tgccagaaagcattgtccagctcaagcgactgatgcatcttgttgggcaacggctcatcatgccagacgggtttggtagcatggaatcccttgaggagttaggtactatcgactgctgcaagtgccccgtcagttttggggaagacctggcacttctgagcaggctgagggtgctccgagtgaccgagtggctttcatcggggtcgaaacaagtgacatggaaaccagaaggaaatctttgatgtcatccctctgcaaactcggaggagacaaccttcggcgtgtcactattatcgacctcgctggcggtggagattgctttgtggagtcgtggcaccctcctcctcgtctcctccagaagttcatccatatcagtcagcaacagcacttctccaggtttccagaatggatcagttcctgcctatgtgatctcacccacctggatataaaggccgaaaagatggaaagggagcatctaagtgttcttgaacacctgcccgccatccgttatctataccttttcgtgaagcgagtctccgaagacgggctcgtcatcagccacagcgcgttccgatgtctacggcgtctcgagttctgtaacttagatggacctggtttgatgtttgcaggaggcgttccaatgctggaatggctgaggctcgggttcgacgcggatagagcgcaatcgacatacggcggtctggaggttggcatccagcgcctctcgtctctcaaacatgtcgtgctcattgtctgtatggtttctgaaggcggtgatgatccagcggagcaagccgtctggtctgccatcaatggccaagtagagatgctccccaattctccgacggttgatatccggtttcggtagacggagtcaggg

SEQ ID NO: 9492 - DNA, 882 bp, Zea mays
tgaggcatcctgtttcttctcaatcacacctaggattggtgaatcatccatgacttccactgaagcagatctctcaacactgataggttcctgctctttcacaattcctgacagtcacacatcagaataagaatacacaattagtaaaatgggttcaacgagcacacaattcagaaactcagcaaacaacgacaaaaaagcaacaattaagcatgcagacaaagagatgacaacaacaacaacaacaaagctttttagtttcaagttgaaattcaacagaagccatggatcaaggttcaagcacgtggatagctgttttccattccttcacattaaagctattttttgggcatattctatccttttaagttaacttaccttttcctgcctctcttcacactactatcacaccttaggattccacaacacacgtgtgcctctagatatctccgatggacatgtctctcaatcggtgttagacaagttttttttcaattggtgctaacttctaacctatcatgtatcgaccacttcttgtatgatcgcatttacgcaaacatatatatataacatgacatctctttgtagaccaacattctataaaatacaacatagcagttctagtcatcgtgctataaaacttgtcttttaccttctgtgatatccttttgtgacaaaaaaaactaatggttggtcttgagcatgcaaacaaaaatcatatggatagatttcaagaaggcattgtcagaatctccaacaattcaaggtacaaatgacagtatttgggaatgcctctcaccttcatggggctctgtgaactgttcctccatgacaaccaccacttcctccaccttaggatcattgcagctcttacccaaaaca

SEQ ID NO: 9493 - DNA, 923 bp, Zea mays
tgacgcagtgacgcctgactggcggtaaaatctgtatctggtttaccaggatgcactgtgacgcgctggcccatggtgagcttctgatgccaattaggactaaacatgcttcctcgctgcgctcaagtgggagaacaagaaatcagcctagacactagtcatctgctgcaagcagaaaatggtatagcacagtgctcctggactacatttcacctgtgcccaatacttgctggtagcagcaatgcctgatcattagaaattgtgtttgcgcctgcagcacccttattcacttaagagttccaagggagcaccaattctgccacggccagtcttcgttttcttcatcgcgacatttggtttctatgtatgctatctctccttcaatcagataacgctagagaacaacagagaggggaatagtcgagaagaacaaagggacgatatttgcagaaagccttatgtgccgtatgaggagctcagttatgtgcactttccaaaacctacaagttatagcaggtaagatccaccacttgactgtgaggagatataaaatctttgcattcctcaattatgtagtacagtatattttgtggctgatgttgatattttttgtctttctgctgcaggggggagtgctcgtgtactcctgttcggttctttgtaatcgtgtctatgcaaagatcgggaagtggatggtttgagaccttgatgaatagtcaccctaacattagttccaatggcgaaatctttaacagaatggatagaagagaaaatatatcgtctatcttacaaacgcttgacacgctgtataatttggactggctcaccagcgccgctaagaatgagtgcacagagcaacaacggtgaacagttaactgaagagagaaagtatgacgccaagtggtgaaagcagtgggggggta

SEQ ID NO: 9494 - DNA, 879 bp, Zea mays
tgttacggaacttcaaatgttagttttttaatttgcttctataaaaatccctttagtaaaaatcgtcgtgataaaaagaatttgtgacttctcaatttgaacgctatagactcgttgtctccctccgtacgatgcttaaaattttccttcagccatactcagattttttccatagctacatcttagcaaaactcattagaaaaaagcttaaccgaacaatgctactccctccgattgaaattagtaggcgttttagctctatagttttatgtctatatttatatagatgataataaatttagatatatatagaacatatatattaactattgtataactctactattaaaaaggtaaagcgaattttattttgaaactaagaaaatatcaaggtatgagcctgacatcgtacaatattggatcagaccgtgcttagatcaaactaaaaaattatgcttgggaccgagcggtcatgccaatacatctatagattgctccatccctttatatattcccctcccctgcctctccgcaaccttcacttgccagttcccactcctaactctctcttcgtttactcttcttcccacccccagcgttcgcttccatccaagctcatatcatcatagatcgacggactaggccacgcgccccaatactcagaactagtcttgagtaaagcatggcgtcgtcttctccgtcctgccgtggcagcggcggcaagtcggacgtggaccggatcaagggcccctggagccccgaggaggacgaggccctgcagcgcctggtggcccgccacggcgcccgcaactggtccctcatcagccggtccatcccgggccgctccggcaagtcgtgccgcctccggtggtgcaacca

SEQ ID NO: 9495 - DNA, 871 bp, Zea mays
tgcgcgaggtatccgtctgtcaaaagtagcccataccaaagtttcgtggcccaaatcttagcttgcctggcaccgtttcgcggtatccgcctcaaactgtcgcggacggcggatcgctggatgcattgagcagacaaaggaagctgaacgtactagtccacatctctccggagtacgggatcgagatgctacaaaagaaaaaggttgcgtcgcccggacggtgtagactacggcggggtgccgccgtggttttgctggcggcgcagatgcaaacgtggaggcgggcggagtgtgttttatggcaggggaagctgcctcccggacgaggggcaggaattcgcggtggccgggggggacggacggcagagcccggcgctcccaccaccagccgtcggatccctgcccgcccgcgccaaccgctatcccatcgcatcatggctcgccctgccgcggcgcgcgcaccgatcagcgagccactcatcacgcgcgccagagaccgtctctactctatggccaaaaggctgcgcggctggcctgcgctggtgcagagcagagcagagcggaggacaccacggccgcgtaccgcaggtgccctgctccctctgtagtacactagtaccacactgtacgcccccgcccggtgaccagcgtccccgcacggatctcctcctcttggccgccggcgccgctgatgtttccgtccctcggcgaccgccaccaccaccaccgttgctgccgcctgccggccactgcccggctcgctagtcgctactcgccacgccaccactagccttttcggcttttcagagcccggtttcactcaccgacgctgacaggagcgctttctttctcaggggtaccgagctcgaat

SEQ ID NO: 9496 - DNA, 901 bp, Zea mays
tgccgtgcgccagcacggaaccaccagtttgtcgtcgcagaacccaaacaaacacattgctggtcagcttagttcaaaatgtgttggattatataatctggccagattataatcccaaacaaacaccccctatgtcatgcaatcttgttagttgctggttgtaactcttaatcaaaccatagtcttaaggtcaagtgcatcacttactatggatttactgtgcagaacattcttgttcattgcaaatactgaacaagactggaaattgtccttcagggacacgttgccacaagtctcagaccaaaagtcagtattgcttccgttaccctctatcattccccttccttttagatagatatatttaattttgaggagatcattccacacaggggaattggtattttttagctttggtatatgcactaggaatataatgctgccaatagtgttactggacaagaataatgtaggaatctcatttggctcagtaatgtataaagaccaagtaatacttcaataacagcaaaacaaagtggtacaatagactggctgcaatcacaagcacaccacatgctagccagtatcaccaaaatagcagaacaaacatggcacacacactgaaaacgaccatatacgatgagccaaactcctgactaacagcatgtaaagaaaagtctcctgctacatcgaacttcaagggctggtggtttgtggggatggggcagtgaatggaggcacctggagtccgggaatggtagggattgttgttggaatcgtagttggaatggatggcatggtagtgggaatcgagggcattggtggcagggtaactgggactgcagaaatagctggtacggtggttggaatcaccgggtttgggagagatgggatcgcgccagca

SEQ ID NO: 9497 - DNA, 848 bp, Zea mays
tgcagctgtcagggccctctccaatggactctggctttctggtaaattcagccgtgcatggaggatattggatgaactggctccaatgggggtgattcctgagacggctcacgaggatatgatcaacgtgttgtgtaagactggcagattcaagcaggcctgcaaattggcagatggcattgtgcagaagggacgtgagatacctgggagggttcgaacgatgatgatcaatgctctaaggaaagcgggaaataccgatctcgcatttaaattggtgcatagtaagataggcattgggtatgaaagatccggcagcgtcaaaagaagagtgaaatttcaaacactgttcgaatgatgatcaatgcactagggaggaaagcaggaaatacccgtctggcatttaaactggtgcatagtaagattggctctgggtatggaagatctggcggcatcgactgaagagtgaaatttgaaacactagttgaatgaggatccgatattctttctgaaagatgggctgggcacatttgaactgatgacactgaaccaaaaccgaggcgaaccgacggttctttggatttttgttcggtgttggcttggaactgcatcaccaaaagtaggagaaaatctcaacctaaaactagaaaactttttttttagattttgaaaggcctcatgtccaatagaatgagaaaatcccacaccgcagacaaccaattgcccggctcgacccacaagggcatcaacaccgcacccgcacgagtcacgacactcctatccccacaccagcgtcgcacgacaccctaaccctatccaccacatcggtcgcagcgatgacgtcggcgtca

SEQ ID NO: 9498 - DNA, 1006 bp, Zea mays
accattacatccaccaaagcctgataagaagagcggatgaacataatggcaacaattcatgcaacataaaagtcaaactaaagcacagcacagcacctggaggttggaaaaaagcgaagggatccccaagtcaggagaaatcaactgatgatcaggagccagaccaccacccgaagcagcttgcagtagaccagcaggaacgagctcagtacattcagcagagcctaacgccagaccagtggggatgctgccctctaaagcgaccccctgatccggagtttgagccaccaccatgccgccagagtgtggaggtgaacccacatgaacatccatggaagtgcaggaaggagacctcgctcggacaccctcgggggctgggtcaaggttggcactgcccactcgagccgggtcatccccggcaacaccctcgggggctgggtagtggcctacactcctcacccgagctgagtcctccccggcgacatcctcgggggctgggcacgtgtcagcactattcaagggatccaagctctctgccgtgaccacctctaaggttgacgggccttcagctacttccatgggatcaggacgatccaggtcagcatcccgaccctcgagatcatgctctaaggtcgacgaggcacgagatgacctcaacccagcatctggcacggccgcacaagttcctgttgcatcagcatctgcagtttccaacaacaagttctcagggaccatatcctctagagcttgatcaaaattggccatggacagttcttgcagaccaataagggcagacaaggcaggagaaggaactccactacttccaccgctagcgacgaactgccgactgtttttccgagttaatggagtttcattttcttcctcctcatcttccacagtagcagcacaaacagcatcctcattggggtcagcagcaggcagagcacacccattgggatcaatatcagcaaggctagttgcagtcatttcttcggcagggtaccag

SEQ ID NO: 9499 - DNA, 901 bp, Zea mays
cccgcaagctttggccttttccgcctgccgtacccgaaatcccgcaagaaactccacccaagaaaaaagcggcgcccttttggctggctggctgccattcctcacgccccacgagtttggtgaggctttgaaacgagcacagttcacaagacagtgaggctgcggtgggtgtttcctcttcggagatggagggaaatttgccgccgcaaaccatggtcccaggcggaggccccttcgatctggggcagccgttccacttcgccgtccaaccccaggcgctccaggtttaccaggatgtcttcgctgcccccgccgcgagccagatgccggagctcggcaatgtggtgaaggcctcgctgagcgacgaggaggagggcggcgacggccacctcgaccgcggcaaggcggcagccgcctcccagtggcaccgggtcaagtggaccagcggcatggtcaagctgctggtgtcggccgtgtcctacatcgacgaggacgtggacgcggaccacgggaccagcagcgggaggaggaagcacgccgtgctcaagaggatgggcaagtggaagctggtctcctcggccatgaccgagaggggtttcgctgtgtcgccgcagcagtgcgaggacaagttcaacgacctcaacaagaggtacaagaggctcactgagatcctcggccggggaagggcttgccagatcgtcgagaagccagagctccttgaacagttgagcctatctgggaagctcagggaggaggccaagaagcatctcaactccaagcatctgcattacgaggagatgtgctcctaccacaacaggaaccgctactgcctgcttgatgatcctgtccttcagaggtccctgcggatggcgcttagggctccagggggatcctctagaga

SEQ ID NO: 9500 - DNA, 933 bp, Zea mays
tggtacgtgccgtgccctgacaattagaacctagctactagctgttctttttattggtatatgttcgtcagttcaatacttactgctctatatcactaattgcagcggtgggaggcgtggatggttgaattggtgagcgtggcgtgcctgtccatcgcctgcaagctggatgaggtcaacatcccatcactccaccatctccagatggaagaggtgatgagccactcgttcctgccggcgacggtccgagacatggagctgacgctgctcaaggcgctccaatggcgcctcgcctgcgtcacgccctactctttcctccttccccttcttaatactcctcctcacacagcagcttggactagccgctgcactcgtctcctcatccgctccctcgcaggtatatatgtaaagtaatctgcagcttcagctagcattaattaattaattccatctaattgcaattaaattagtgcgtgcagagcccttgttcatccagtttgatgcctccgttatagcctcctctgctcttcggtgtgtggcgctgcaggatcatcgacaccatcatcacaacactactactactgattatggtagctgcatcatcagccgccttgttcgtcctgcaactgataccttcaacgccttgtgtgtatgtactacagtcagtattatttatatatgtacaaagaattaggtagctagctagctagtaaaataaacaaaaataaataaataatggagcgcgcctgctgtcatgcatatatatgcaggacggagcagatgacgacgacgacgacgagtgtttcatgatgatgaaaacactctgcgacgacgacgcaagctgcagcagctcggcggatcagcttcgaattggtggaacacccatcgtcaccagctctacatgcatgagcagcgatgagcaggggtaccgag

SEQ ID NO: 9501 - DNA, 849 bp, Zea mays
attttacttattccatatagctatcttagtttcttaggtataatggatataaattcgtcttcatctcttgtctccaggagaatcagatcaattattacactatcttgtgaccacgcaaaatgtcctacttaaaattcaattataacattataagaccatccaatccaaaggatgaaaaaaaaaatcactgtttgcttctaacggccatccaaaggaccaaaacaaaaaaaaaaccatggccagtgcctctatcatttgacgggcttggataatgttctgcttgttggcagttagttatcttgatatgtgtcatgtaacgtgattttgtatctgtggaccgattgctaatcggtcgtgtcatgaaatttcagtcagaatttgcgttgcaatatagttacagtccaaatagcgccatttgtccctttagttcgcttgttgcttcattttggacaatttgcaactcataatacttatcgttaatatttctagtttaaatggatatccataatattttattttaatgaaaagattattcctctattgtcatgaatgctcatctgatcggctataaacgtccagtgattttagttttatttatcacaatcgggtctactgggcttggtcggattttgctaattgacagccgttacggcttacggcccaacagtttttacctataaaacgaaaggcccaactgcacggttcgttttgttttaataaaaaagaaaaacagaaaataagcacatcctcctccatcaccaaattgacgattatatcgaaaatctggacggcggcggactcgattgtagcagcagccgccgggaacaagatggcggcggcgttgtcgca

SEQ ID NO: 9502 - DNA, 879 bp, Zea mays
tgcagacacttggtctggttttctaactgtaggacattatagggcatgtttatcaggcttaaacccttgacaacatttcccacaaggtgaaggacctctcttgtacacattcttatctatccccacacccctattttgcatgcttgtcagtccttaatctgcaaaccattatctagatttttaaaatgtgaattgaattattctgcaagttcatttagatatttttgaaaaagcaatcccaatatagattgcagtttcacaatttcaacaaccaattcaactgcataatattctgtttagtttatttgtcaattatttgatattaatttgccgacttcatcatgaaagttgagtatctcaagtctcaacatgtcttatagacacaatggcgaaatggccactagccgagttggttaggtggtatgagtagcactcctcaggtcttgggttcgactcctcgtgggagtgaattttaggttgtggttaaaaaaatcccctcatctgtcccacgccaaagcacaggtttaaggctcagccccggtcgcggtcgttctcacatgggcttcgatgccgctgtgtatgggtggggcggggggttccggggttttctcgaagtgtgtgagaaggtcttcttcttaatacaatactcgggggctgtcttaccccccgtgggtcgagtttttatagacacaatctagtttctgtgggatgtttaatggactaatcaggtatcgatgcatggaaaggacgttttgggtcatggcatcccatgcttacaaatgaaaccatcattacttcagtatataaagcaaagtttacttacaataaacaacaatgcaacacacttttgccatgaggtatatacattgatgttcaggg

SEQ ID NO: 9503 - DNA, 1057 bp, Zea mays
tgatacattcgagctcggtcccctgcagtccttttccaccatctcagtggacaaatcaaccacaagctcctctctgttgtccaaagtaatcttagtcacctccaatagtgccattagatgggacatcgcctcaccacgcatcacttgcagacggtacagagcattcatgcaccgtacggtcaagtgcgcggtctgtcctgggtagatggcccagatatccttggcatgctccacccgatccttccacattgggtcgtcctccctctcagcggggaacaagccaatggggtgggtagccagctccaaaggatggaatccacagaaagtggtcaatccatgcagagcaatcgcctcgatcgtgtcctccgctcggtatccgaaagactcggagtccaaagagcgccagcctggctgcaggggatgaggctccaaggtcatcctcaccctacagcggggcactcggtgcttctcgaactgctgcaccgcgtactgagggggtgtcgtgtatccggccccctgaagtacctcccacaaaatgcggggaaagccctctcgtgcaagcccgtcagtgtgggtcagtgcatttccgtcatcggaggatccgtgggaagtcatctgtgtacggttaagcgtaagtaaaagaaaaagaattataaaaagaaaaaggaaaaataaaactcagcctttctctagttaaatgaaaaggtactggggtacttagttggtcatcattttgtattaaagtcctttactcaattatccatttgttttaatttaagaatgcatgcatgctcgtcctgaacgacctcacaacaagataaaaggaatagggaagaactcccatcccttaaatgtggcctgtagggcttaatcacttagccacctagctacccttctattaccctaaggcttcacgtcctaggtctatcctgctcgtcctactatctatccaacattgtttctatcaagttttactttggaaaaaggatggtattcatgttttattgattcctctgtggtggtacaagctccgataccaggggtaccgagctcgaat

SEQ ID NO: 9504 - DNA, 921 bp, Zea mays
tggtaccaaggtcgggtctctgtgctagtgctattagctagtgtaaggagcgagtaggtcagttaaggctggtgcgtcgtgagggctgtcttgtgtgtagctacagcagacggttcatcagaaggattattcgtgcagtatatacagtacaactagacaatgatgttgatgattggtctagagctagaggcctatagccctatactactgtgtattgtccgccgttttagttttttggtcccatcccatcaatgcaaccgccttgttttgctccaattgtcccgttcctgcgcctcgcttttgctctgtcgcatcgcatacaaaaaaaaaaaacgctcgcgccggctttgaatcgcgccccccaactgctccaaccaggcaacggacacggccaccgtccgtgtcgcgagcaaaaaaacaaaaagaggaacgcgtccaggacgaagcagtccactgccgctgtggccggcaaaagatctggttgagcacatggagattggagaaggttggttggttcttctggaaacgccaatgaatgggggcactgacatgtactcttaacatgtagtgcaatccagagatcggatatccagacactggcagcacgatcgcctcgcgccgtagatcacgcacgcaaattactgaagaccattcacaaaaaaaaaaaaacacacaggggctagcgtgccccacaccaaacccaagtgctgcgttgcacgcaggggagcgaaaaaaaacaataatgctcactgtcacgtcgcgtatccaaccccgcggacgtctcggctctcagcagcagcacacggggcacctcacgatgccgttctcgttgcactccgtgcaccgccggaacccgccgccgcattcgtcgccctcctcctcctcctccgcctcgtcttcgtcacccacgtacaccttgca

SEQ ID NO: 9505 - DNA, 849 bp, Zea mays
caacatgatgttgttacgcctgataggcttactgctcttctgcctcctaatgatcccaatcatactatggttcagatacaggcccagtctactgcacaatcaaatgctttagatggtggcaaagcgcatgatgctcataccacctcatctttggtcaagaacacacacagcaacatggagcatgttgtgcagaagagtatctcacagtcgcataatatcagtatggtaaagactaagcaaggctacaggaaaagacaggttgtttcagaggagaaaatttctggcgagaaggcaagtgcttcagtaaccactgattccagtgtgcagaaaaatgttgatgttcccgtcgacacagtaacggctgttgttgcaccacatgatgatcccccaactcagaacaagaagggaacccggcatttgaggagtaagaaaaaggtagatgatgcttcagttatttctaaacatccacctgtggtgtttaatgaacagaatacagtgaaaatctctaccgagccaaaaacacatactggtggtgttattatcagtagctctattgttccgattgaaggtactattgtaactgttggaagtataactgttggtggactttcacttacagctatgaatcaggagcatgttaattcagcagatggaacaaatagtactgaaagtggcctatcaagacctcagcaagcaagaaaatctggaaagcatcagcatgttcttcggcctgttgagaagccacatgggaatgatggtgtcttgtgggcaccagatatgctaccattgcataatgagcagtctgatggagccatgccgactgcagcagtagctgacgtcactcagcca

SEQ ID NO: 9506 - DNA, 912 bp, Zea mays
atgcgagctcggtacccctgaaatcggtgcgccctcccattctgtcgacttctattcctttttacctttggtctggtctctagcaggagcagcacaccatcctgtcattttgctcgtaggaaatgaaggcggttaggtctgcggtacaggaagagaaaggcaatctacctgcacaaaataccgactttagagacggttagttttgtgtgaaaaaaaaatatatatgtgattacgctctactgagccatgctgtcgtgcaagaaactgcaacgatttttttgttttgtagaacaataaaaatgcaggacaagcttggcagacaccaggccaagcacagtattgaagagcaaacagcaacacaggcgtgaattggtgcttccttgcagaggtgaagggctgttctgctggatattcagatcctttcaatggatcaaaaggggggaaagctggcagatacacggaatcacatgaagtattcattttttttaatatataccagcaagtttccaagtgcaaatatctctataacagtgagcaatttcaagagtaatgtacaagaactgcttgttttgtaacaattccatgactactaatactactattacaaacttaatcttgaaataaaatctgcacagcctcctattgttccagtgttctaaacatgcttaaaacaaaaataaaatttgttacccaatgaggaattggaatctggaggtggccatgtaatattgcacgtcagcatgtaatcatttctgcaattttgctgcttcatcacagctagctgagatctccttatgtcatttaactgaaatgcaacagtctagtactccatcccaccttgtaaactgaataacattatggagttaattctggacttccgacctcttcagggggatcctctagagtaaactg

SEQ ID NO: 9507 - DNA, 913 bp, Zea mays
tgatagcgagatcatctaggtcgccagccgccattacttgctgcagatttggcggagagttgaggaaatccaagcatgcatccttcagtccattgcaccggtgcttgtcagcaagctcaagcatatctgccaccgtatccgtgtcgatgtatgagcacatcatgtactcacagatcagtcgaagcctcgggatgtcatatctatctgcagccacaagcaggtcctgccacatatactcttcttcttcttcctcctcctcttcaatgtccggcacatgatcggtgtacatgaaaccgagcaacagcctgaataccttggcgtccatgtcatggatgtgcaccacggtgtctgccgccccctccttcatggagccaaagagctcggccctgaagacagcggagcgggcggcaaacacgcaccggtgcgccatgaacttctcgccgccgacctgaaatgtcacgtcggcgcccacctgcgacaggaggagattgccgaggtggtgcagaatggaaggaggaggcacggtaacgaaccgcctggcggcggccgcttccccgatgttgacattcttgacgatggccacgtcacacctgatagtgaaactgtcgtccctgagatgcttcgatttctcgaactgctgtctattcatcaaacaggggaagctgaatgcgtccgtgctagagaaacggtacggtccccttgcaccggcggcgagcaacaacgatgactctgacggctgaacctggccaaagaagctaaacgcatactgcgccacgacaggctcgacgacgttgaaatcgtcaagaacgagataaaaggatatgtagtcgctgttctcctgttcgtagccgttagggtagcactcgatggtccaacgatggcctccgatcttgaacgggtttgaccgtaggca

SEQ ID NO: 9508 - DNA, 910 bp, Zea mays
tggagagagcttataagttcatcgatgaactgccaataaatcccacccccatcttatggaggacgttgctttctgcttgtggaggccatggagatgtcgaacttggcaagcgtgtctttgagaggattcttgagctggacgattctcatggtggtgactatgtaatattctcgaatttgtgtgcaaacactggatactgggaagagatgaatagggtaaggaaactgatgagcgacaaaggtgtggtaaaggtgcctggctgcagctcaatcgagatagataacacggttcatgagttcttcgcaggagatggaaggcaccccaaatcacaagaagcacggaaaatggttgatgaagtgatcgatcaactaaagcttgttggttatatccctgatacctcacatgtgtttcatgtcgaaatggatgaggaggagaaggcgataagcctaaaataccatagtgagaagctggcaattgcttttgggcttctaaatactgctccaggggctacactgcgtgttgtcaagaatctccgtgtatgcccagattgccactcgatggcaaagtttgtctcaatggtcttcaataggcgaattatactcagagatctcaatcgcttccatcactttgaaagagggatatgctcttgtggtgactattggtaaatttgtaggaacaaaattcttgcacctcaatatcttgtattgcaatgccttccactcaggttgtggtgaatctgtatatccatggaaaacctactgacgactgatgattctttctatgaatattattggcactgaatgatactatgttatgtaaccttgattttgctgttggatatccaattgtggccaaagcccatcaacttgctgattttcggagttgagtgcaccacattgctgtggcagca

SEQ ID NO: 9509 - DNA, 907 bp, Zea mays
gaatttctttcagtcccatcaattttggctgcccatcaagtatactgaacagatcaagaataaaagacatgagaatgagattcgaaacgcaaatatttttcttgtcctgtattgcgatgctaacaatatactccctccgtccacaaaaacggaagccttgctaaatatataagctttcatacaatataggcatatacagttatattaagttattaaccctaacgttataagttttcatacaacagatggcacctaactctgttatattaatgtactcacaactctggttagggtttctcccattctaacaagcatcaccatccaaacacaacctaaatttagttgttccatcgtccgtattatttcaagcattttacattagggcagtgatcttactttcgaattcagaaaaaaaaaatgaagaaatagagaaaagatttatagtttcatactgtgattcaagaactatagatttaactagcatgcacgataatattaatctcatagaaaagaggataacaaaatcaaagaccacgcctgaatgaaatgagaagagacttctcttttcaccgtcatgtccttttgggagaaaaagagcaacatcaagaatcaagaaaatgaataacttgttttcctatttgctgtaagacacaaaactaaatgtaataaaattactaaactgtagaaatggctaaacgagactagcctgacttgcttaggcccttcattgttttctttgattctaaaggtttcgttgttattgttgtgcacaaatggtttaagactttaagtgtacttacgccaccatgttgcagctaaagctagactgcagagctgtatgacgatacaagttgttcaggacaacagcaggatctgcacttcttttcagggggatcctctagagacg

SEQ ID NO: 9510 - DNA, 866 bp, Zea mays
tgaactgataggagaggcacttaaagcctatgcagttagatggctgccagactcctacgatgcattagttgccgaggattacatgaggaggaatcaatgtctggttgagacaataatatggttgctgccttctgacaagagctcgggatgttcttgcagatttctcctgaaactgttgaaagtggccatactagtcggaggcggggagcacgtgaaggaagagcttatcaggaggatcagcttccagttgcacaaagctactgttaaggatctcttattacctgccacttcgccgcctaatgatggtacatatgatgttcggctggtgcataatcttgtccagagatttgttgcaagaacagcgctgtctcataatggcggtttcattgagaagtccgacgaaaagatgattgagctcaacttcgagcaagaatccattttgtcggtaggagagcttgttgatggctacctgtctgaagtagcttcggatcaagacctttcattgtctatgtttgttgaactggcgactgccgtgccagaggtggctaggcctgttcatgacaacctgtactatgcagtcgatgcatatctcaaggtatgttcaaacgtagaaggcaaacacttcgtgcgcctagcttgatgttcagttattgctgttgtattgtagtacattgtttggatgtttatactatgaatggcaaatctgttctttctaatcaggaacacccagacataaacaagtccgagaagaagaagatttgcagtctggtggatgtcaagaagctcagcgcagatgcatccgtgcacgccacacaaaacgaccgcctgcctctccggttggtggttcaggtcctcttcttccagca

SEQ ID NO: 9511 - DNA, 859 bp, Zea mays
tgactcctccccctccccctcgtcgtcgtcgtcgtcgtctctccggccgtgccgccgctaaccttgacgccccacccgagctcgttgtcggggacgtcggacagggagaagccccagcgcagcggtccgtggctggacggcctggacctgtccatctgaacccagccttctgtcttgagagtctcgtacagctcgcagtccaccatcagcgccatggcaccgccagcccggttgtcgaacttgatgctcagctcggtgtgtccttctgtagtgccgcctccggtggggtgttctggtctcaggctgccccgtgggatggcgacgattccaacatggttgagccgggacgacgacgacgacggtgagtggacctgccaaagtcccgacaagctgagcttcacatcgttggctggtctgcaggtcacttgcccgaacgtcgtcacgcggttagttgttcctcctccgccgcccccactgtctagtcctcctgaacccaggatcagcccagccaaggaggcggtgagcttggatccttggatcctcaagccagcgccgcagtcatggtgctcgaaggttgacggtgggccgtcgagagaggcttgagcccgtagattctgccaacagttcccatgaatttaatttcgtcagtccattcactagctacatggttcagtcttgtccaaggaaagcaacagatgtactaccaatctaccatatacatacctggatcatgcttgaactatgcaagaagttggtgcaccgggctccaaacgggaccaaggtcagggacagccacctgttgacacgggcgctgtactgcagcctggtcagctcgacgggtctcccaatatgatggcca

SEQ ID NO: 9512 - DNA, 897 bp, Zea mays
tgatttatatatatacctaaaccaaaaagagttgatatatgtgtgtgtgcgcacgcgcgcgaaacgtattgtattctagctaattaattaattgtttgatacatgctaaagtgaaatgatatatcttggtagattgaaggtgcttggaatgaagatggaaagggggaaagcaactgggatcacttctgccacaatcatccgggtaaggttcatatatataccccagctttgattaattagcttgtttttgtttgttcataattaataacatcatacgttatatccttgtttatttccttatttttttatgcctctttcatgtgcatatcaatagaaaggatactggacgggagcaattcagacattggagcgaattcgtaccatatgtacaaagtaagtccactcccggcccgtaggaattcggagcggagacacctttaattttgcaatatgagtttcgggcagtttcagatcccatttttcttttacccaaatattcggccgcctggatccgaaacaggcagcagccccgccgcgggaaaaatttctttgcccatggagctcatgatctgtaatttggcctgttgttggaccgccatggagctctccaacatgaagctaatcatcattgacaacatccaagatgtaaaaatgattatagaacaatataacatataatatttcttatggaagttttaaatattatgttattagtctattacaaacctgaaaaaaaaacaaaggagtccacagttttcaaattaatattaggtcggacatgaactatttccttgcgcaggaaatattttctgcttattattctaagctaaaattttggatctcggttggaaaggttgtccttttcttgtgtaaataggatgaaattttgggtaacca

SEQ ID NO: 9513 - DNA, 867 bp, Zea mays
tgcactccaccattgatcgatcgatggggctccatgcatcgaacaaggtttccccacaaacacatgggcatactttgatcgcactccatgcatgcaaccggtagccaacaacaacaacaacacaaccaaaaggcacctccgatcccatgcagcatgccaagcaaacaaaagggatcttttaaagaaaaagaaaccgttgctctatcattgccatctttcctgtcgtgcatccatttttttttttgccaagttaaatcgatctgtcacagacccacagtttgcattggagagggggctttcttggttgcataaggaagcatgaatgtaaataacttgtaaccatgtttttttgttttttgaatgcgtttaattcacaagctttttgaatgcgagttcaattatgtcggaaggaactgttggatgtccgttgggttattgggtagtggtttatgttccaaacacgagccctctacattcaacgtattagctgaggcaccagcaccaggccagttaactctacaagcccctactcttcttggtcccgtggctacagtcacagagcaagtagctgagcacgttggacacacttgtgccgatgaacggcacgttcagcaccggccgaaccctaacaccatggctaccgctactgccgccgccgccgccgccttttctgctacctccatagtagtaagttcttgagctaccaccgttgttgctagtagcagccccagcgacgatgccgaatttcttgtggtactggtgatgatgaggccgatggctggcggcgtcgtccggggccgcgccatcatcacccaaggtggcagcagcagcaccccgcgccacgctcgccgccgagccgactgacca

SEQ ID NO: 9514 - DNA, 853 bp, Zea mays
tgagaggacctgtccttgcactcttgtttaagtttgctagcaaacactgttttgaatgtgctgcctgaacttgctaaactctagctgttttacctggtgtcttgggaccctaaatctttgcttctggttttggtaaatatttgcacttgtttagtctagtttcaaatgtattgtactattcaccttaatctcttaggtagtgtttggttccagagtatggtgggatagagcccctctgcttctaatttattgttgtttggattggttccgagtaggaaatagtgactctaaaaatggaaaattatcctcaaatgatgaaccatctggctccccaaaatcacccggacggagccgctccctagcatatggagccactccatcccaattggctctggaaccaaacagtaccttagttatttacttggatgcccacattggttgaataaagctattttttatgtcattattagcagaccccaatgctgacttttgtgttactagggaaagcatgatgagacggttaaagaatgcacaaaagcacttgagctcaatccatcatacctgaaagccctgcttcggagggcagaagcgcacgaaaagcttgaacactatgatgaagctattgccggttagatgttctctcttatggttttttatgtgacagtcgcacattatcaccttcaacataagcatgcatcattgctgaagctcactagttctgattgctgtcaattgatccctgctcatagatatgaaaaaggttattgaaatggatccttcaaatcaacaagccacaaggtctcttttcggctgagcccctggcagggggtctctaatcgactgcaggcatgca

SEQ ID NO: 9515 - DNA, 1544 bp, Zea mays
atgtggtgatcctcgcagaagtccaagaattttctgccggtgaactaggtaccgttgtcggtgatgatggagttcgggaccccgaagcgatggatgatgttggtgaagaagtcaccgcctgctcggacctgatgcagttcaggggtcggacctcgacccacttggagaatttgtcgatggcgaccagcaggtgcgtgtagcccccgggcgccttctgcaagggaccgacgaggtccagaccccacacagcaaagggccaggtgatgggtatcgtctgtagagcctgagcgggcaggtgggtctgcttcgcatagaattgacacccttcgcaggtgcggacaattctagtggcgtcagccaccgccgttggccagtagaagccttgccggaaagcattcccgacaagggctcgaggcgctgcatgatggccgcaagcccccgagtgtatctcttgcaagagttcctgaccttcggtgatggagatgcatcgctggaggatgcccgaggggctgcggtggtagagctcctcctcatcgcccagcaagacgaacgacttggcgcgtcgcgctacccgccgagcctcggctcggtcgaggggtagctctcctcggtggagatattgcaggtacggggtctgccagtttcgatcaggcgtgaccccacttctctcctcctcgacgcgcagtgcctcaccctcgggggccgagggtacctcgggctgaaccgagggtgcctcgggccgagccgagggtgcctcgggctgtgccgagggcatctcgggctgggccgagggcgcctcaggctcgggcgagtcgtcgatcttgacggagggttgatgcagatcccaggagaagacgtccgggggaaccgttgttcgccccgaggctatttttgccagctcgtccgcagtctcgttgtagcgccgagcgatgtggttaagctcgagcccgtagaacttgtcttccaggcgccgaacctcatcgcagtaggcctccatcttcgggtcgcggcagtgggagttcttcatgacttggtcgatgacgagctgcgagtcaccatgagcgtcgaggcgcctgacccctagctcgatggcgatccgcaacccgttgaccagagcctcgtactcagccacattgttggacgccgggaaatggaggcgtagcacatagtgtaggtgtttcccgaggggcgagatgaagagtaggcccgcgccggctcctgtcttcatcagcgacccgtcgaagaacatggtccagagctccggttggatcggagctgttgggagctgagtgtcgacccattcagctacgaagtccgccaagacctgagacttgatggccttccgaggagcgaacgagatcgtctcgcccatgatttccaccgcccactttgcaatccttcccgaggcctcccggcactcgctgacgaagtagactggcctctgaacgggcaatgcttgcccctcttcttgcctctcgaccacaatcgcggcgctaaccatctgagtggtcgcggcgacgtagaccaagagggcttctccggca

SEQ ID NO: 9516 - DNA, 840 bp, Zea mays
aaggttagcatgcatataaggggttcgaattaagaaataccaccctctccacaaaccagtccttttagcccccaaaatgtgtgtcacacaaggtgcctttccgccaccactttacaatttgataaagcaaaaggagagaaaaatcaaagactatgggggaaaaaaagaaacatccatgcagtagcctgctggtaaaataaagcaagggctggaaagttcattcagaaatgaataaaggagtgaagcgaaaggaacctgcaggccagggaatacaaaacaaaacaaaagctcagattcctctcctctccaaacaggtcctatcccttttgcttctcccttgctgttgttttctccctctagagactagagaccccatctctagaaagagaaagcaggacaagcaaagctaccggccagacagcagctagctatagctctaaagattgccctgacctgatcagatgatatgagctttttgcaagatggtggctatagcagctagagtagtatttctgttgtgatgtgctcaagccaagcatgatatgggtggagaattcaggagctctttgatgcagcagatggtgtggagtagtagtggcggcggtacagacagcaagaatatgatgagtagtagtttgatgccttgtgccgaggagcaagaagaagagggctccaacaagatgccccctttatcttctccttccatgctcctcctcccgcagcaccacctccaaatcttctcgggcctgcctctgcctctgcctcctgaggtgctgaacgacagctctgctacttctgatctgcatgatggccgggaaagcagcatgccggagtcatgga

SEQ ID NO: 9517 - DNA, 862 bp, Zea mays
tgctgtacagcctccagatgcccgtaatgaacctgtaagcttttggactgctacagcgctactccagtaccagtaattactgacagcacaacacacgtgcgcagttattgatggcgttgaatgactgtggcggtgcaggtacgtgcccgggatggacaaggggaaggctctccatttcctctttgtcaagtcggagacgaagacgccgggcggcctcgcggcgaggcccgtcctgacgagctactacaagagcaaccacttcaagaaccgcccgttcgacgcctacaacaactacaccagccccacggcggccatcctctgcgccgacgcgttccagagcatgtacgcgcagatgctgtgcgggctgtgccagcgccaggacgtgctgcgcgtcggcgcggtgttcgcgtcgggcctcctccgcgccattcgcttcctccagctcaactgggagcagctcgcggaggacatcgaagccggctcgctcaccccgcgcgtcaccgacccgtcggtgcgcgaggcggtcgccggcatcctccgcgctgaccccgagctcgcggcgctggtccgctccgagtgctccaagggcgactgggctggcatcatcacccgcatttggcccagcaccaagtacctggacgtcatcgtcaccggcgccatggcgcagtacatcccgacgctcaagtactacagcggcgggctcccgatggcgtgcaccatgtacgcgtcctccgagtgctacttcgggctgaacctccgccccatgtgcgacccctcggaggtgtcctacaccctgatgcccaacatgtgctacttcgagttcctgccgatggactccgcggcggcgtccggcggcgacgcg

SEQ ID NO: 9518 - DNA, 869 bp, Zea mays
ccaaggacctgagcaagatcaagaggcagaacacgatcacccacctcctcctcggcgccgtcatcgtcctgaccgccgtgtggcaggtcaacgaggtgtcgttcctcctctggctgcagagcaagctgagcaaccccttcaagtccctcggggacatggtcaaggcctccctcctcaagcttagagggaggaggccggtgctcgagtcgtcgccgctgccgctggccggcgtccccgacgtcagccgggctgatctgccgacgtttgtcatcggcggcaccgagcacgtaggtaaatgagctagctgtgtggtgatccgaggattgattaaaatgtccagcatctgtttgttgcgaataatttatgaactgggattgattcttgaattatgaactgacacaccaacatttccgggaggcatataatgcctgggagccaagtatttctagattctcttatactggctcgtaagattcaaacagtttgtgaagtgtcaaccgtacgatagtatcgatgctatgattttgaggtggcgagtgatcgcttcagtttggcgatctttgaacaagagggccacatcatcttatggatgattagtgctcataccacgccatatttagctcggcgtaatgtgtaattgcagaacagtaacttgatcattctaggccaaagaagcataattgtcctggttccatctccaacacgaaatgcatcgtgttcatcagtgcacctgtgcacgatacattccataccgtttgaaggcggtgttggtgaccaaaatttgtccaacaaaactgcagtgtgaccccccccccccccaccaaaaaaaatcgggtaagctaaaggccgcactcaaagtagaaccagca

SEQ ID NO: 9519 - DNA, 1115 bp, Zea mays
ggaagttgcatttgcacttcttaaggatccccctgattctaaaacttgatgcccgtgtagctgatgcttactgtgagaacattaccttggaggtcacactgcttgtcaaggccaatgcaacccatataaaatcccagatgggctggcggactatcatatccttgctctgcatcaccgcacgccatcctgatgcttctgatgcaggatttgaagccctggtttttatcatgtcagaaggagcgcacctctcacctgccaacttcatcctttcagtggaggcatcaaggcagtttgcagaatctcggcttgggtctgcagaaagatctatccatgctttgaacctaatggcagactcagttaattgtcttgtgcgatggtcacaagaggttagagaagctggtggagaggcagatagaatattggaaggaattgcagagatgtggctgcggcttgtgcaggctctacgcaaggtgtgcatggatcaaagagaagaagtgaggaaccatgcattgttatcgttgcatagatgcttggtagttgatggaatatcagttaagtcttcaacatggttgatggcatttgacattattttccagttgcttgacgaactgttggagattgctcagagctactcaccaaaggatttcagaaacatggaggtatctctcttgcatgctgtaaaactgttatgcaaggtgttcttgcagtcacttaaagacctctcaggacagcacagttttgataagctgtggttggaggttcttgacatgatagagaagttcatgaaagtcaaattgagaggcaggaggacagagaagctacaagaggctattccggagttagtcaagaacatactaatgatgatgaaagctagtgggatcctgtcaaaaacaggtgccagtgaaaacagtttctgggaagcaacatggcttcaagttaacaagattgcaccctctctacaattagaaatttttcctgacaatgaggatggcagcacaactcaagttgaagaaaacaaattggatacacaagtgcaatctgaccagaacaatgatcgataggacattatactttctcccatcctatcaagttagttggtcaggggtacgagaaga

SEQ ID NO: 9520 - DNA, 709 bp, Zea mays
ggttcatgagaagaattacccaatccatgatctagagttggcagcagtggttcacgcactgaagacatggaggcactatctgtatggacagaaatgcgatgtttacacagatcacaagagtctgaagtacatattcactcagtcagagctgaacatgaggcaacgaagatggttagagttgatcaaagactatgagttggagattcattaccatccaggcaaagcaaacgtagtggcagatgctttgagcagaaagagtcaagtcaatctgatggtcgctcgcccgatgccttatgagttggccaaggagtttgacaggttgagtctcggatttctgaacaattcgcgaggagtcacagttgaattggaacctaccttggagcgcgaaatcaaagaagcgcagaagaatgatgaaaagatcagtgagattcggcgattgattctagatggcagaggcaaagattttcgagaagatgctgaaggcgtgatatggttcaaagaccgcttgtgtgttcccaatgtccagtccattcgggagttgattctcaaggaagctcatgagacagcttattcgattcaccctggcagtgagaagatgtatcaggatctgaagaagaaattctggtggtacggaatgaagagggaaatcgcagagcatgtggctatgtgcgatagttgtcgaagaattaaggcagagcaccagagacca

SEQ ID NO: 9521 - DNA, 891 bp, Zea mays
ctgatacgaattcgagcctcggtacccctgctcgaacgaatgaatcggttcctaaagcaacagagtcaagcccaagccaaggccatggcacaggctcatgcgcaagcacaggcacaagatcatgctcaagcacatgcacaagcacaggcacaagcgtagtctcagctccttggttcaagctcaagcacacgtagatatgcgagctgaggaatcactacttctcatttcatcggatatatgctgctgctaaatgaactgttacttacaaaataattttgtttccaatattgactcatttacatgtactgctagttggattaggtaagccatgttttattttgcatcgactgatactgagcataagaaaatagaatttggaagcacaagcagatattcagacattagagaacctaataaacaaaaaaaagaaacaacagatcggcctatacttagaaacattttaacaggatatgagctacatttttatgttgttggaatgaacaacaaatacgatatgcagaccaaatgtttagcgatatttattgatggatactactggctttattgcacaaatggcttaaattttgagtagtgcatcaatgacagtagtagagaataaattgatataaccttagaaacgtttgatgaagggcttcaagctcacgctcttctgggtgaccttcatacagccacacagcctgagctgcttcgtcgcttccaagaccgcgccattgtagtcattgaccatgcagttcgaaaggttgagctcgatgagctggctgcaactctcacagatggcgaacaggcttgcatcatggtcaatgaggtggcaagggaagcgtcatggtccttaaccaaggcagaaacagccgcgtccgtgaccgtgagatt

SEQ ID NO: 9522 - DNA, 899 bp, Zea mays
aacgcttgtctattgcctcctttcgtccaaatatccctagcagcgccatgccgacgaacactagccgcatgcctctcatcctaaccaaatttcactcacgtacgttaacagcagttaacgtacgcgcgctgtcattttttcctctgcgtgcatatacacatacactgaatcactgatacactacgcccttcttccttcttcctatataaagaggccctagctccaagtctacaatgcaacagatacacacacactcgggtaaagctatctcgagctagctagctgctgtaagccgttgccatggccaaaatggtgttgctctgcgtgctcgtctccttcctcctgatgcccttggcctccctagccctgacgcaggacttctgcgtcgccgacctgacctgcagcgacacgccggcggggtacccgtgcaagtccagcgtcaccgccaacgacttctacttccacggcctggccggccagggcaaaataaacccactcatcaaggccgccgtgaccccggccttcgtgggccagttcccgggcgtcaacgggcttggcatctctgcggccaggctcgacatcgaggtgggcggcgtcgtgccgctgcacacccacccggcgggctcagagctcctcttcgtgacccagggcaccgtcgccgccggcttcatcagctccggctccaacaccgtctacaccaagacgctgtacgccggcgacatcatggtgttcccccagggcctgctccactaccagtacaacgccggcaccggcgctgccgtgggcctcgtcgccttcagcagccccaaccccggcctgcagatcaccgactttgcgctctttgccaacaacctcccgtccgccgtcgtggagaaggtcaccttcttggacgacgcgca

SEQ ID NO: 9523 - DNA, 894 bp, Zea mays
tgtaaagtttaagttgctggagcctggggataaagtctgcccagtgcccactatgtgttgccatcgaaaaggaaaatgaaaagtcaagcagtcaaaggatgtcgtggaatctgcaggtttcattgtttcaatcaatcaatcggtccaaagtcagttaatggaccaggaatatatataacaactaaagatccacacttgttacaaatggattttccacaaataaagccatgtttctaccgatatgattgagattaaaaattcgaacctatccgaccaatcaatcaaaagatctgtgatggtcagtctcctttaccactgaaaaaagaaaccaatctttgagcaataacgaaaaaaaaacaaggaacactaggaacgtgaatccagcacctagtcatccactatgttttttatattctaaaagaatactattcttgtccacaccaaattaagcaggaaatcaaccgccttgtatttaaacctgaggtgtggactctgaaaagaaaacaaagaagaccttaatttcatgccttctttttgactaaatattgatacttgttcactgtttttttttctcaggaaaaaagaacgaaaagtaaaatatatatatgaaatacaaaataaaggtaaaataacaggtacaggacacatgactgaactagattacttggatccaacccaagattaaagctgcaccgcaagcccgagccaataaaacaaaacacaatagtataggaaccagtggggacacgtaagttgcaggaagaataggtaccatttccttgaggtcgtcgccatggaggtcctgaaggatgtcgaggaaccgatcgaggaggagagcgtcgtactcgatgagcttatcgtcctccgaaaccttccccggcaccagcatccgca

SEQ ID NO: 9524 - DNA, 870 bp, Zea mays
gaacgaccgagggaactccggtgaagttaggttcgctacgcattcaaactgcaacagaacaaccaggtgttagaagatagatcgacggtgttaagctcggcagtcctccttttagatctacttgcctctaccaaagtgtgtaactgaaaacttcgcttaagcaatgttgtacgagtttttccaacataaagattaccttttgatgcctgtacttctcgcggatggcgttaagagggcagttactggtgttatgctggagttcccgtagagcacagacacacaattgaatgtcagagcatttgtaagaggtgtagtgctctagagtctggttctgcacacgattgaacagccacaggtcagggataaaaccaagttctttttttttgaaagcatgtgctgctgtatgtgccaagtgtttcttatgcgtacccatgggaggtcggattggtcaagcgtccatctagcaagaaacacggccgatgctgccaccaacgacggaagaaatttcaagaactcatattcggtcaaagtcaactccgcgagataattggccagaaatcctaaagtcatagaaggagtctgcagataaacttcagaacttagtgcttagatcaaacacttatgcataactcaactgaaaatggttgctgtaagatttgatgccaatcttactttacgagatgcttgtgccgctctaaggaatctcctgataaaaataaagaaaaggcatgttagtaatgctgcagtggtttcccatttcaaaagaattactaggcacgtttcgcaaaagtaacctgagaaatgtttttgttgttggaacagaaaggttaaatcccaggtcattcagcaggggtaccgagctagaagtcg

SEQ ID NO: 9525 - DNA, 844 bp, Zea mays
gaccctctgcactcgccatccgcgggacaggagctcgacaccctcatcaagggcaccatcgccgggggcggcgtcatcccgcacatccacaagtcgctcatcaacaagaccgccaaggagtgaatcaaggccgtgctgctgcttctgcctgactacagtcccatctcgttctgtacttgtgcaatctgagtttaagtgcatgttggcacagttctagtaaactcatcctgttcacctatgcttctatcttgttaatttaagctctattccgcgagctttttggattgctggtatcgtgattaacgggttcgtaaaattagtacgtcgaaccttgcaattgaatccgattgtttggttctttttttttgctatcgttctgacgtcgtagacagctatttaagctattaaccgtaaacgctgcacagctccacctcgtcgtgcctcaccgccgcggctctgctctcctcccggcatacccgctcgggcgctctacctgctcgtcgtctctacccgcggcggtgagcgcgaatgctcgtcattccctggcaacggcaactgcggaacgaggggtcgaggaggcagaagaacaatgtgagcgtggaggacgtggagtgccgagaattctcggcgagcacgaagattacgacgatgtccccgtaggaacctttgcttcaccaccagcgaccggaagatatcgtcgagctcaccccctcgtcttcctccatagctgccgcgaactgtgacaacaggtggtgcttgtcacagcagacgccgtcgctgacgccgtgtgatcgctcctttgacttcatgatcgccgttgcggtcagggggatctctagagtcg

SEQ ID NO: 9526 - DNA, 885 bp, Zea mays
tgcatgcgtccgccattcttcacggcggcggccacggatgggtcaggtatacaagtgaacaactattctctgtctagtttcagtttttcggtaggaataacaaataagaggtgccaacaccgattcaggttttcagtatgacagagcttaattaacctgtgtatactattgttatgtgcttgattgatcagaacaatgctgcattgttttttttttgtttgactaatctagtttgctgttacatcgacgatgggtggctgcctgcctgatccacgcaggtcgtccgggcgctggaaggcgacgtatccctggacgacctgaacgagggcgtgcggcccgggcacagccggttcgtggggtcgtacggcagttcgacgtccgactacgacaccagccagtacaaggaggacctgaagaagttccggaagatggcgctgggcggcagcgggctccagagcagcagcgcgcagacgccgacgagcgagcacggggagaacccgtcggtgtcggtgtcgagcagcgacggcgacggcggcggaggaaccggcgaggagcgtgaagacagacggcaggcagcgtcgtgaggcgtgaggcgtgcccagcctacggcccccgcgcatgcatctgtagatcctagtcctctcgacatcgctacgtacatgtctaattgatagctgacctgtggccgggaggcgggactactgagagattcatgattgctttcttttcttttgtgtgtgtgtgtgattctcttggtgggtacactggtctcatgcatgcgatctctgtataaattcaccgactctttaggaactgattactattggctattcgtatattatgagtatactcagtgttgcacgaaatcgacatggggaatgagca

SEQ ID NO: 9527 - DNA, 913 bp, Zea mays
ctgccttctcttcaagacattaaaaatataacagttttctaatggttagacaatgtatccaccatttcatttgcttgtttttctttgcacgtcaaaataaatctttttacatgctcataaattagctgcgaagatcgttgactcaaaatatactaccttctaaacaaaacgccttttccaatagcatgtctgatttctattttcatttaagagacaatgtatccattcgttcttgttttttttccctgcgttaaaatgaatcttagctttacatgctcatgaactaattaacgataaagatcgttgtctaaaaatatagtgtattttagaggcgaccgaaacatagcaaatcccccaagtattacacaatcgcgaaattacaaataaatacattatcgcacacacgtatattaaatattggaaatttgagaatatgacgagctcaccctcgtccgtcgccggtagtgcagaccccacgtgtcaggttgaagaatattgtatcgatcgaccggtgctagttgttacacgtacgtacgtaggactcaccactctgttcagtttgtgttctagtgaatattcatcgtttcgaattttcaccgggtgcagtacacatgcatctatcgatgtgtcgacgtgcacgagacgagctcagtcagattgccatgccacgtacagtgtgcagtgtgtgtagagttttgacgtacgaccggcgatcgacctcacctcccctgcatgtcggcgagctgctggaagagctcccccgccggcggcggtggacgcgtcgggcacggcaccgcccgcgggtacgacagaaccgccgccgcccgccgccgcggcgccgtcctggtcgtccccgtcgccgccctgccgcgcgccctcgggctggatggcgtcctgcaggggtaccgagctc

SEQ ID NO: 9528 - DNA, 860 bp, Zea mays
tgtgcaatacaggcaatggtgaaaagttgtacaaattaaaattcgtttttaaaaaattagtgaatttataaacatttaatgcattatatatatattcgtcgtcttctatttaaatatagacataaaaacacatgctaaaacgaattgtattgggaaatagatggggtatttttttcattgttcatgtttaacttatgaccacataaacgaaaaatctggaaaaaaaacaaatcagtaacaaagacaaaaaatattaaaaacactcaccgtggggctcaaactcatgaccacaaggttaaaagccttgcactctaccgactaagctagacaggttttgtgtttacacaaccgagctcagcgccatagatcttggcgccgagctctgtatcacgtcggcgccacgacgttcatttgtgccaacgcagcatgtacctcagcgccatagcctatggcgccgagctatgttatctcagctatgacgccgagcaaagagtcaaaaaatgacattaaaattttctagggtccaaacgtgattttttttccgagaaagggccaaaatgcaaaaaattcgggaagcggaacaagggtgctttgggtcccccctcatattaacaactaccgaggcattttagcagcgagcaagaaacggaaatgccgatatgcatatctgaaaagcgatcacaatgcatcactgacaagaacgagcaggttgtagcaaacgtgagcacagttaaaagttaaccatccgatcaataatgcaaggaacaaaggaaccaccaccatcatcctaaacggtcttgtgtttaaacgccaatgtaaatgctatagggtgatatgttctgtccgtttaattggctgca

SEQ ID NO: 9529 - DNA, 857 bp, Zea mays
tgctccagctccttgacgaagttgatcgcgccgccgacgatggatgcctgatcgccctgcacgcaagccaaacgcgcgcgcatcgtcgagcactcgtgctacattgatttatttgctaggactagccgactaggagggtgcgcgcgcatgggatcgaaatcaaactcgtcggttacccgttgcgtgtgggccggcggcatgagtgagcggagcgcggcgaggtgctcgttcatctgcttgcggcggttgcgctccaccgcaatgtggatcatccgctggctctccacttcctcctcgttcttcactggcctcatcctccgccgcttcctccttccggacgccgctgccgcagccattgccggggcatcctgaccggcggcaccactcgcactccccgcagacgccacaggtagtgagccggcagcaccgttgtcacccagctcctgcaggagctgcggcggcgagctcgcggccgcgttccagccgcggccggcggcgccacccatctcgaacaacccctccgttccactaaacaacagatcactccaagcccctcctgctgccatggcaccgcacccaaagcgactgccttgctggaactgggactgggatagcaccacggcctccagtgccatccctttcagggtctcgcctctcaagaaaccaccaccagcagcagcagccgcctgcagactcgagctagaatccgagaaaagttaggtcgcttctcccatgggactatgggagcgccgcccggccggtgagccgttcggagcggttgttgtggcggcttcttgtagcaacagcttggagctggatggcgctacgctacggggctggaggcacacgtgaacgca

SEQ ID NO: 9530 - DNA, 902 bp, Zea mays
attcgagctcggtaccctgcgttcgcgtcgcgtcgcgtgtccctccagccccgtagcgccttccagctccaacctgttgctacaactacaagaagccgccacacaaccaccgcgctcccaacggctcaccgtcaccggccgggaggcgatcccatgggagagacgacctaacttttctcggattctagctcgggtctgcactctgcacgctgctgctgctggtttcttgagaggcgagaccctgaagggatggcactggaggccgtggtgctttcccagcaaggcagtcgctttgggtgtggtgccatggcagcaggagggccttggagtggcctgttttttagtggaatggagggcgtggtcgagatcggtagtggcgctggcggcggccgggacgtggccgggtgctcgccgccacagctcctgcaggagccggctgcccgcgcgctgcctgtggcgtcgtccgtggggagcgcgagtggcggcgccggtcaggatgccccggcggcacttgctgtgaccgcgacagcggcggccggaaccggaagaaggaagcggcgaaggatgaggccactgaagaacgaggaggaagtggagagccagcgcatggtccacattgccgtggagcgcaaccggcggaagcagatgaacgagtacctcgctgcgctccgctccctcatgccgcccgcctacacgcaacgggtaaccgacgagctcgattccgatgatccccatgccagccatgcacgccctttccttgtacctagcaaaaaaaaaaaaaaatcaatctagcacgacgacgacgcaccagactaatgggctcgcgcgtctgccctgtgtgtgcagggcgatcaggcgtccatcgtcggcggcgcgatcaacttcgtcaaggagctggagca

SEQ ID NO: 9531 - DNA, 855 bp, Zea mays
tgagcggcatcgcggccgtcatcaagagcctgcacccgagctggtcccccgcggcggtgaagtcggcgatcatgacgtcgtcgggcacggcggaccacgcgggcgtgccgatcaaggacgagcagtacaggcgggcgagcttctacagcatgggcgccgggtacgtgaacccgtcccgcgccgtcgacccggggctggtgtacgacctcggcgccggcgagtacatcgcctacctctgcgggctgggcatcggggacggcggcgtgaaggagataacggggcgccgcgtcgcctgcggcggcaagcggctgaaggccatcaccgaggcggagctcaactacccgtcgctggtggtgaagctgctgtcccgcccggtcaccgtccgccgcaccgtgaccaatgtcgggaaggccagctccgtgtacagggccgtggtggacatgcccagcagggccgtgtccgtggtggtgcggcccccgacgctgcggttcgacagggtgaacgagaagcggagcttcaccgtgacggtgcggtggagcgggccgccggccgtcggcggcgtcgagggcaacctgaagtgggtgtcgagggatcacgtagtccgcagcccgatcgtgataccgccggcgaaggccaccgcgtaggcgtagctcccagcccaaatgcccaattgatgagtgccccggcattggtcggcaaacggcatgtatccctccaacaaggtcagtagcggtatgtggtaatcttgagtgtgaccggtgtacgtatggcgaaggaagtaggcaggcgactgttgtataggcagggtaacccatcatctgtgacgcagcaagctcaggggtaccgagctcgaat

SEQ ID NO: 9532 - DNA, 1046 bp, Zea mays
ctagacttagttcagtttcgagaactgaaattgcagcaggatgcctagtttagagatcatttgtgattaattcaataggttttagactatggtgcttgtagaggaataaagacatatattggtgaacaacttccttaaagggtgatggacatgattccatacaagaattggagtaacaactgcttaaagtggggctctgttgtggctgtaactgaattatattcagttactgaaaactgaatttcagtgaaaggtgctgagtttggagcccatttgtgactgatgtttgtagatttgggctaagagttccatagcaaagttgtagaccatagtaaagtgaacaagtttgctaaagagagatggacctggttccacataaatttaggagtaaaagtggccaaaaggtggactgtcaggtgttgggattcagacttagaataatatttaagtctgaatatgtgtgtttttacccaactttggggccttgtggtaatatatccaaagagatttgggtttagattctgtagcaaaatgagagaccagatgtagatgaacaagttttgtgcaaatattgggcttgctactgtatggaatttagagaatagcctgctgcaaaatcctctatcagaattattatgcgctgtttcaaggcactgaaaatctgtttcagggttgtgtttaactaactttggagctctgtggtaattaatccatggagattttaatttagcgctctatggtaaagtcaaagaccatttgaaggagagcaagtcttatgcaaagtattggcttgctactgtgtagaatttggagaaaaataagtgacaaaaccctctgtcagactttgtaggtgctgtttcagttaaactgaaactgtgtttcagtgaggtttgcccaactttagagcgccataactcttgaattatgggcatctggccttaggatactgcaactaacttgtagagctatgataggtgagcaaattctgtgaaccaaaattagcctgttgtccctgagaatttggagaaaactggattccaatgtga

SEQ ID NO: 9533 - DNA, 914 bp, Zea mays
tggtcagagtggcctagcaagctcacttgctaactctgctgacaagcttccaacaggcacacgctgtgctgatccatgtcttcctggcttttatcaggtatgcttaagctcatcattattatcttattgttatatttgagataaaaagagaataaatactgttggaactacttctaaaacataaagatgctcatggtaaattagtccttactatcttctgtgattttttaatcttatgattatttttcccaggttgcattctttcccgcttcacccttctcaaagggatatagtaaagcggaatccacataaaaaggagtggtggactggtgcaggtccttcaggacctttcatttacactcctttcagcaaagcaggagcttctgggacttccaagcaagagcttagttggattgttggggagccggttcaagtcatggttgagttagcaaacccttgcagcttcgacatagttgtggagagcatctatctctctgtccattctgggaattttgatgcctttccagttagtgttagtcttccacctaacacttcaagattagttttattatctggtattccaacaaaagtcggacaaatatcaattcctgggtgcatcgttcattgctttggtgttattacagaacacctattcaaggaggtcgattgtttgctccttagagctgcacaaggacttgtcctttctgatcctttcagatgctgtggctctagcaagtttaagtgtgtcaactttcctagcatttctgttgttcctcctctgccattgttagttgccaatgttgtgggtggagatggttctattcttctttatgaaggggaaattcgtgatgttctgataacactgacaaatgccagaaccgtaccagggggatctatagagtcgtcgcgcaatg

SEQ ID NO: 9534 - DNA, 869 bp, Zea mays
tcgagctcggtaccctgtaatgaggtgaatccttgggagtggatgacaggggccaacctttttcttgagcttaccaccaggcaggcgtttgacctcttcgggcttagaggcggaagcatcccctgaaacgacagagtgagatgagagatcaatttcggtccctcgaataagcaatagcatcacagatcgaaggttgacatccaccatgctccctagcccctacccactgcgaaatccacagcggggggttcacagcacgaggtgacgcgggtacggacctgcggcgctgctggagccgtcggagatcccgacgccctggaggcgctccccgaccttgtcgacgtccctgtcgccacccgcaccgcctgcgcgcccagacaaaccaagcaagcacatcatgcgtgtcagactaggcggcgcggagcggggaagggaggggcggcgggacgaaccggacgaggagggaccggcgacgaggtcgtcggggtagacgccgggcgcgtgcgcccgcagccagggcttgcagcgctggaagtcggggccgaactcgcagtactcggccgggaggccgcagacgccgcagtacagcacgcgcaccggagccggcttctccgctgccatcgccgctttcttcgattcggtgcggagagcggtggcgattatttggattcggttttgcgggtggggtggggtggggggcccgggggtgacgattgtgtgggggaatcgagcctctctggtgtctgctcgtgctaggtttattctcttgggccgtcggctctatttgcggcccatcttgtgagctggcccatcccacaagctgagcgtggcacttgctggctgcctagatagctccatcggtagcggca

SEQ ID NO: 9535 - DNA, 1479 bp, Zea mays
gataaggttattggggctgttctgacacaagaaactgaggggaaggagcatgtggtgacatatctaagtcggaggttggtggatgctgaaacaaggtacacttttattgagaagttatgcttatgcttgttttatgcatgcaccaagtgtagatgttatttactgtctagtcattgcattgtttctggtcaagccgatgtgatcaaatacatgttgcataacccaattatgagtggtagaattggtaagtgggcttatgcactcatagaatatgacttggcttatgaaccattgaaatctatgaaaggccaagtcatagcggattttattgtagaacatcgggttaatgatattcatgaactagacatatcatacctcactattactccttgaactttatattttgatggatcggtttgcaatgaggggcaaggaattggcattgtgcttgtttcaccaagtaatgtctcctttgacttctctagccgattgaaaacttattgcactaataatcaagctgaatatgaagctcttttgttcggcttggaacttttaaattgtatgggagtaaaacatgtgaaggcatttggtgattctcagctggtcgtccaacatgtgttagaagaatatcaatgttttgatggtactctaaatagttaccttgaaaaatgttggagcataatccattcttttgacgaattcagtattcggcatatctctagagttgagaatcatagagctaacaatttggcacaagatgcatcaggttatcggataaagagagggaaatttcacaaaactgaaaatctgataaccagtgcagagccaaattcccaggtcgcggaccgtccgcgtgatgacgccagaccgtccggggttaccagaaatgttctcttaatcgattcggctgacattgaagccgatgcaagtgattggaggacacctatacttaattatttacgaaatcccaatatcaggacagataagaacattcggcgaacagctttcaagtatgttttgatgagtgatgaactttaccgccgaacagtcaatgatgtcctgcttaagtgcttgggctcagatgatgctatattagccatggccaaagtacatgaaggaatttgtggtactcatcaatcagctccaaagatgaagtggttgttgcgaaggtctgggttttattggcctagtatgatagctgattgtttcaagcaaggttcaagaaaacgctaggcgctaggcaggcgttagcctactgactagcgcctaggaagattaaacgtagattaagcgtgattaatcgtgattattttttttttattttttgtgctgccgagagcaagatcagtagtaagtactaagtaataataacacaactaagtagtaatactagtgaacatacctcttgctgttctgcatatttatttttgacataagttgctttcctccttggcttcttgcaagttgcatccaacagca

SEQ ID NO: 9536 - DNA, 927 bp, Zea mays
gattttccctgcagtttactctagaggatccttttgccaatatgtgtctcacactacctctttgattgacatatagcgaagagatgtcgccattccaaaaaaatggtagagatgagtgaaaacttgttattagctagcaggttggtatccaaaaaataagagaatatgaaaagggtatatcaaacaattgttttccaactccaagtaccttatctactattttcccatatgcaaaagatatgtaacaagcgactcaacaagttgacttagttaagctctgtaaatcttgtaaagaccggagcaacttcaatgatggcatgtctaaaaattttggcatcaaaatacctcaaaagtcctactttagagcccataatgttctggtgatcacataaccgactgaagcctgaagcgacatattgtgcctgttatgccaaaagtaaatgataactaaatgaaccaaaaaatgagtggcatgcatgtgcgtgtatgtgtggttgcaggtttcctctcatagaggaaaactacaccagacatgacagaactgaggaactgaggaagtggtaatttgtcaacgaaccaagctagagcaagcaagcctgccatgagaaacaatgaggtggtcttcgacgacagatctccgtcctttgtgcaaacaatgctaaaaatcaattggcagattggagtccaacgagaaaatacattaatcatgtactaaactcgcgaatgaaactgaaaccctaaactatttgcaatatattaccctgatgcatgccattgcctattgccagcaacgtctgccgcctgctagtggttggtggcggtagagatgcccctcttttttcagtcgagaagactacaacgcagatctggggttggggctcgccttctggagttgttctctgcctcttttttcaggggtaccgagaa

SEQ ID NO: 9537 - DNA, 866 bp, Zea mays
gttgattagttttagagtcaaatgcatgttgtaaacttgtgattttattagatattcataattgatgcagctaagttaatggttccttgttctgattattagggaaaaaagatgttgtggttggaaatgctatagtgtttcttcctttcatgtatgtcattccatatcattattcagtcatgacttgattctacatcttagagcatatatgtgaaatagttggaataaagtttttgtccggaccaatatgtattgctgcttttgatcctactgttacaccatctcgattctactttttggacaggggattctttaacagtgacttttggtggactcaaacatacacgattctagcatttggttctttgtgttgttcctgagcacagtctagtgacctctctttttgagcccgatgctaaaaaacagtgttcagctaaagaaaaaactagagacaacaaaatgctacaaggcaatatttttttagttttcataaatacatgagtttacatcctccataacttagttcaagggaataatgaaatcatgcagtttgtgaaggtacactagatcctacaaccacaggtaaacataaacttgctcataacctatactatacatatgcacactgtttcatcattttattttccaaccatggctggatttctttgcttccttctagaacctaggtccatcttagattcatagagctttgttttctgcctccttgagccctccaacatttcaacctgaaagcaaaagttaatctgcacaccataagtttctcggaattgtaaacattaattctgttttgtaccatatgtgatatctgtttatacggataccggttgcaggggtaccgagctcga

SEQ ID NO: 9538 - DNA, 889 bp, Zea mays
tggaagggccatagttgaggcagtcgaaatgggagaatctagtgagccccttccgagtggcagaccatgctcttcattaaagtcttcttctccatttgatgttattgatgagttatcttgatgacctccagggcccatgtccctgttactagttaagcagggactagattcctttgttgaagtaggatccatctgccattcatccatttcattattggcagcactgttggattcatggccatgtgctaattgctcactggagtttggatcctccacagctacactacagccttcaaccaaaacatcatcatctgctgttctgtagttttcaggactcagagaaacatcacttatttggttgcaacactcagcaggatcacttctggatactgaatcatatggcacatcagtttcagcatcttcaccttcacaatccatttgtgtaccctctgtttcctgtgcaacatcatattgatcattctgttgtcccgatactggcatgtcacttgcaaaagagaagtcattatctgcagtatcctcttcagtatgcttcaaaaacttcttgggagcctcattactagtaatcctgaatttcttatttacatgtctggtctcaggttcatgctcttcaccaaagccatgaactaatctagtactagaaggtgaaaatgcacgcctgccagtcctcaacagagatcggtgcttccggatcttctttgatgtagatgctgacctgtttgatccattgcttggccctgcagtggagaaggaaagagtcctagcttcaaatcttttcactgaagtgggattcctcactatatcataattatctagtttggtagcttctctcctcccaatctccttaatttttctctttgcaagagcagca

SEQ ID NO: 9539 - DNA, 1596 bp, Zea mays
cagcggtcacgtcgtcagccaggcttacgtcccatccgggggcagtgagagaaccctctctcacggcgtgaagacgacgcgcccgtgttctgttcctcgaacggctcgcgcacgcgcaatggccgccccgcgaaccgcacgccccgtcgcatttactccgcggcgagaaaggcggcgtctctgacgggaggagcgcgcggtgcttcgccttcgccataataaccgcgccaaaaaaggtacgccgcgtcattcgatttcatatccttttccttttttcctctttctctatctcttgcaacagggaccgggaaagggggataccccgaaaaggatctttccccgtgaaggaaccaggctccgagcctccctactgatcagaggttcgaaggctggccccccgaagggttccgacagccgcctcagatcgcgtgggccctacacccactactggtcagaggttcgaaggccggcccctcggaagggttccacggccgcctcaggctactcgggctccgcgcccattactgatcaggggttcgaaggctggcccccgaagggttcacagtcgcctcagacaccgagcgagggatgaccaggggtacgttcgatacataaccaaggctcgggctgcgctcccgaggtaccctaggacatttccgagaccagcgggagcgatcttgtaacggaatcccatcggagggaggcatcgagccctcggaccccgtcaaaaggggaccgggtccggcagatcacccgcaggtacttttgggcgtgcctctgggcccctagccgacccctaacgaacggggcacggacgtccactcggattacccgcttgcagctcaccggagacaccatgttcggtgcccatcgagggtaacatggcgctttcccccctcctccttgcggaaaggcgacgcaggggcgtatgtaaaaaagtcgagtctgtccctgatcgccctctcgccctgtgcagaggctcgggggctgctctcgcaaacccggctccggccaaaccgttgacagcgtcaacataccagcccgagaacttgggacccgaccgtgcacccgggctacggccagctcgcatgagggaacgaccagaccagccgaagcattgcgaaatgcattaagacctcggaggagtcaaaccactcctccgaggcctcgggggctacacccggcgggtgcgctcgcgcgcacccaccagaacaaaacgcaaccgagaaaggctggtccccttgcaaaaaagtgcgacaaaagcctccaagcgagtgctaacactcccttcgaggctcgggggctactgtcggggaccataattaggggtaccctcaaggctcctaattctcagctggtaacccccatcaacataaagctgcaaaggcctgatgggagcgattaagtcagggatcggtccattcgagggactcgatcacgcatcgcccgagcccagcctcggacaagggcagccgaccccggaggatctacgtctcgcccgaggcccccctccagcaacggacacaccttcggctcgcccaaggcccagtcttcaccaagaagcaaccttggccaaatcgccacgccaaccgacca

SEQ ID NO: 9540 - DNA, 885 bp, Zea mays
cccccgaaaacctctcatctcatgtgcacctttttccgtgtatccgaaagcagggggaaattgttccggacaaattgcgaggaacaaccaactgataaggtagacgtcagcgtccaccatttctacagttgctctgactatgtcctctatctccctcaatatctcactccatatttcaaactccaccatataaacagtgtaatctacaatataaacagtattttgcacgaccgtttacacgacctgctgaagatgaccttagagcctcttacactccacggtagagctaaagtttgaggaattctcgtgaataagatacatgttgaattatatgaaggagtttcttaaatttatctagtgagtcgagaaacgtaacatagtattcagtttgacctccgaattgatccgacacgccccgaattaatcaccgtcactgtcaaagctcacaggccgacaggcagggactgcaaattctgcagcgccattttctctaccaagcaaatcaaaccgacaggtcattttgggatcgaggagatttggaattcagagatctatgtgatggtaacctgctaaaagcccactaaaattccatcttgcctttcagtgtcagtttccataatctgcagtagcaattgggggcctctgactgagcacaccagcctgtgtgctgtgcactgcccacttgtggaccttggctatctatacatttatgcaccatcatagtctgttttttttcccttgcaaatggcaatcatctgtctccacttgattagatcctccatacatatataatgcaattgaacagaaaggtttggtagggagcatatatgtggcatagtacctgaggatggatggcatacatgcatccaggttggcactaatgca

SEQ ID NO: 9541 - DNA, 890 bp, Zea mays
gccctgtgttttggaggtacgtagcagagcactaactacctctagagagaggccaggagctggaggagtcgtgagcgggggggcgcatcacaggtccggcaccgacatgcgcagagcgtcaccgtggcactcccactcccaccgcagcaagcgcgcgccgttcgacgccgccctctccgccgccaacaacaagctgccctggccgtcgccgcggcgcccggcgaaccatgccgtcctcctttctgacctcttcttcctcttccgcttcgtcgcacctctcttacctgatccctgctagggcggcgccgccgcctccctttgccatggtacgtacgtaccttaaagagtaccacaaacgtcctgatccgtcgatcgtgtagcgtactctctgatacatctcttccacagttccactcagacatgcatgcatgcacatgcgatgactagctagcggtgtgttcctgttcctggcagggacagggatacggtgccaccagtggcggcggcgtggcgaacgccacgagtgccgcggcggcgcctccgcctccgaggcagggagccagcaggaacgcgggcgcggggcacccgccgctgccgcgcccgccgccgcggcagtgcccgcgctgccggtccgccaacaccaagttctgctactacaacaactacagccgcgagcagccacggtacctctgcaaggcgtgccgccgccactggaccgagggcggcacgctccgcgacgtgcccgtcggcggcggccgcaagaacaggcgcggcgccaagggcggcgccgctgcgaaagggtctgcctcggccgcggccgcggctccggcgcagcagggagggaacgtcgtcctcggcgccgacacgttcccaggggacttgctgcggca

SEQ ID NO: 9542 - DNA, 852 bp, Zea mays
tgcagcgcgccattgtagttgccggcgacgccggtggagagcacctcgagggtggcagcccgtgacacgatgcttgagaacagcgtcgaccactggttctgcacgcaccaagatggaaatggcggacacacagcagaagtctcagataatgcacgcggtgagtgaagcatcgtcagatcctgctgattaacataataacgtttactgaatcattagttggttattaataattaccacgtccatgagcatctcgatgaggctgacgtggttcatgatgaccacgacggcctcccgcgacgcttccgagcggagctccggcagcttgggaccaacgcccctggggaagaacccgcgggcgtactcttcctcgttgagagtctcgatggtagccccgtctacggcaagggcagggatccagagcggctcgccgagctgggccatccgcaccagctcctccatggcggcgacggcgagctcgacaaccaaccccttgtcaaagtcaaacccaccgccaccatgacggtggaggccaccgaacacgtctgttccgccgggcaggaggtggtggtgggaggaaagcgccgggccggagacgttgtttgacaggttgttggggggcagcagcagcaggctgccagcgggcttgccgacgtacttggcggcgatggtggagatgcggtcgacctcgtcgcggaggcgcgcgttctcgacgcggaggtggtgctcgtcgaaggacatctcgccgatgacggccgtggccgccgggccgccgcagctcgggcacgaggcgttggcgagcgcgtccttgtaccgcgcgttctcggcgcgcagcttctcgttctccgcccgcag

SEQ ID NO: 9543 - DNA, 914 bp, Zea mays
tgctcctacatccttctggtccacaaagtggttcaggctcatcagcacattcgcgaggtcaggtctccatggaggagtcgcggaatcaagagccttccttgtcatgtccactgcttctggtacctgaccagttttgaaaaacccaccagccaacttataccaggtattagcgtaaggtgtcctccctttcttgatggcgccatccacgagagctactgccttctccacgagaccttctctgcagtaggcatcgaccattacgttgattaatctgaaatcatgatagcgaagaggcaccgtttcccactctttcagtgtcgcttccgccccatcaatgtcgttcgtcctgagtaacgcgcttagcctcgacatgtacatcgtgttgcacggcggcactttggatttgtagacactccaaatgcgtcctgcctcagcatgcatccccagttcagtatatgtcttgagtaagaaagcgtatgcgattctactgctctttggagatatccgcctctcggcttccacgagagccatgacagcccccacctgcatcccagatttcatgaacaagctcgctgccgaagcatgcccatgccaagtcacaagcttctcgtgtggattggccttgtcgagcaccttaccaaccccctggacatcttcagcagcaatgtacgcagctaacatagcctccacactgaaagtatcaggcttcacacctttctcttccatgtcctggaacatggcgtgcactctttcaagctgcccagtctgtaggtaaagcttcatcatccaagtgtatgcgtaagaactcgtcatccccatctcctgcatcttcgcgaagtgctcctcagccttgtcgacggccttcgcctccacatagcatttcaggagggagccgtagcactgcggcttcctca

SEQ ID NO: 9544 - DNA, 887 bp, Zea mays
tggtgtaaagcggcttcttttctgcggtgtgggctgtcaagtgcaaggtcttttcctttacctggcctttattatctttctattgctgatgttttatcaaatgcaaaagtaaaatgctaaagttattatttgaactacagctttgagatctgtagaaaagtaccttggtttggaaaagctttatgtgcttggaacaaactgtggtaatttccattactcctctcaaaccagtcaatatttacattttctgtcgtggaagataatattgtagctctgacatactgtaattttcttagttgacaatggtacgcgtgaagggcttgataaattcttgaaagcggcaagcagtgagccagaaactgttatgcattatgaatttatgcaagactacaaggtatgacattgaaacaattagctgcatacattctttttcccacattggtaggtccatgtatggataatcaataggataggaatacagttttccatatcaacagctcaaggagcagttttacgatcaacacaagaacacatggcatttacagaattgccatgattttccttagattttttttatgtatgatcacattgtataactgagaatatttacaggtgcatctaaagcatttagatgggcacattgaagaggtaaatatttgtttgccaataattctgaggctttatggattctacaatggaactatttaagtcagggcctaatttttgcaggttccttatttttgcctgccagcaaacgacctggtagatgttattgcaccgtcatgctataggtattctctattcagtatatcgggttgttagtttcttttccaaaacttttattggccgttcacaggtgagctaatgatttgcttataccaattgca

SEQ ID NO: 9545 - DNA, 897 bp, Zea mays
tgtttgttgcaacatgcgctccagctcgagataccagtgcaggctatgttgcttggggacactccactcttgttggacctgtaagttgacctgagagttccatttattgcactttagttctgtcagtaactactgagggcctgtttgggagctcagttttgttacagttttaaagcaatactatagtatttgatgataccgtggtattggaagccaaaaggtgtttggctgctactaataaaacacagtttcaaataccatggtctacttgaaactgtagtatttttggagttttggaaactccactcaacacctctgttttcttctgttttacacgcatgccttccgcccacccctgacgtcatagttctgtctactgtacagtaccaagcagccatggtgtatttccttcactcccagacagatctcggtatttttaaaatcaatggttttgccgtggttttgaaaactgtagtattattgtcacgaacaaatataaaccatagtatttcaaaaccgtagtatgaaaaactttgttgccaaacactccctgagactctgcaccaccacaaatctagttttggttctgataaaataaaacctcttgtgatttttgcgaacaatcttaaagatgtacgctagcaaagatatgtcacaccataactaaccatttgcgtactgctagttcggagaggtgattgctacaacggagcatgaggaggcgaccataatagcagatattgactactcactgattgagcagaggaggtaagcagagtgaaatcctatgttttccagtagtcttatatattttcacctttggttgaatggggtcgccgaaatcttctccaggcaatttcttcctgtgcaacaccagcggcgtggcgatctctatca

SEQ ID NO: 9546 - DNA, 860 bp, Zea mays
gctgcctgttgtcgactctagttgatccccctgacaatgtagagggcaggctttccggaggagcactccgctgctcggcttatctcgtcccagatgttatcgaatgacattgcaccatcgaggaagtcgaatccagttacatcctcagtgccttgaggatggaaaaacccaatgaatgacttactgtgagcaactgtgagtggacggatctttgcatgaaggacagtttcaagatcaaagtgcttatcaggaaagcgctctctgtaggtctcgttctcacagagtctcctccattccagagatccttctcggatcaggttgtcaaactgtgacctgattggcatcaggtcctggtttgtttggaaccagtctgcaacaacagccacaagtgctgtgcatgcactctcccctgcagcccgttcgcttctctggtctatcgatgcaaagaacacctgtgtagaaagcttcaagtggccatctcggctaaatacttccttcgactcccagttccccacaacaaaatcgtcatcaccaaataccgacaccatactgttagtagaaccatttgatccctgcaaatggtcaagatgatattctgtcaattgacccccgacataatgctagtataaaaagaaggaacaaaaaaccaaaaaacttgagatgtcaataaaatatgtacctctgaaacagatccatcagaaggggtcaacagccgccgatcgtagtcaatatcatcaccaccctcctctccatacggcttcaacagaggctcccctttagcctttggtaattttacctttctccaccgagctggaagtatgctcctcttccgccgcaaagggatggaagcatgctcctca

SEQ ID NO: 9547 - DNA, 875 bp, Zea mays
tgtaagacctaggttcacttgaaaatattctttcagcactatcacatagatctgcaatctcattgcagtcaagaaagaactgccttcgaacagggggcttccagccacgaggtttcagaagagaagcaattacctggataattgggccacagaatataattaggtgagtagttagcaaagcaatatagaaaatcttcatcttagtgaaaacatcatcatatgaagtgcttgttcttttgcagaagccattatgataataactcttttcagtttcaaataagcatttctagcacatgttggcatgttgcttttgacacataatcttaggcatggtaaaaaagtttagaatacctttttgggcacactattaatagacatttgtcgatctaataatttccttgccgcagttgcattctcaggggttccataaatgacccttctaccttcattctcaaactgatcaatggacaactgcctaaccatgccacctaaggcacctccagtttctgcagccaccacaacctacaaaatcaaaagatgtaactggtgtcaaaacaaataagagctattttgggcaatgacttctaagataaaacatattgaatgtctaaatatgaatagaataactaaatttaaacaacaagcagcaaaatgaactacgttttcaactcactgctctatggtgcaaccgaacaccaggaggtgctgttgaattgttgacaagagcaacatctggttttatgaggcttgaattttgcttggtacttggtgcagcatctggagactgttccctatcaggtgaatgctccatctcaccattaacttgcctagcctttacagcagctaaagtagcactgattgcctcagcctctgca

SEQ ID NO: 9548 - DNA, 857 bp, Zea mays
aattcgagctcggtacccctgtccaagcagcaggctgggttcatctcctgctgccgatttcggtctccatcgatcgattccttactccgaggtggtgtctacagattgttggagattcttccatgcagtagatggaaaaccaacccagttttttttcttttcttttctttttagtcttcacgacattctcgtcgagctttcgcaggatttgtaatctaatcaccttcttctcccgggacaaagagaagggacctgataagatgttcagggaattaaacgtgcaaagcttttaatctaacatctacttattcttgttttttgtttggttcataaatttgcatatactaccgttttcttcacgggttaataattagtattattatagaagatagagctattctacttaatttaagaaatagacttgtgatacaaatcatctcgtcttgaatagagtgacatgccgttttttttataatgacttcaacattttttcgttccttcttctatatttatctccctgtccaaagacttccgaaagtatacgattacgaaggtctttatatagtcatctctcaaacaaaaccttctataatttttccatcgtgtgtgttgtgacgctctcaggtagcgacggagaatcgttttgaaaccaatgacaccctatcagtattccgccgtgtcgacctggagagtcgttttgagccagattgagagtgagctttgttttggtggcttgggggtaccctgtttggctccgattcaactgatccttatgagaaacagaaacgagttatgctgccactccctacctgcatccttactgacagcgcacttccatcctgtagcgtcctcattca

SEQ ID NO: 9549 - DNA, 878 bp, Zea mays
tggcagaagatcctagccttcatgaaaatcaaagattccaaaaaggaaagcatagattactcaacaaattcatgtagacttggactagcaaatatcaatgaatgctaatgtcctgagcataaaaaaatggaccgtaaaaaaataacaattaccacctaaaacggatcataaacataacatggatctgagacctaccaacagaaaaacaaatcgttcgaactaaatcagactataccagctacaattaggcatggcaaaacagcagatctgagttaacaaattggtgtcacccaaggatcacagcagacctgattcatcttaaacataaggtgcaaactaactggtacacgcaaaaaaaattgaagaatcgagaaatctaagacatctggagtgaaccaggactgcaacttatcttatctctacagatcggacagaccaatcacagagagaacagtcggaagccagtaaacccaaatccacctaaattacctcgagtacccacacaaacatcagattcgaaccacaagcaattgaaaacctctgattcaatccaatcaacacaagacaccgtgagatggaaccaaaacgccttgaagccaactagaaataccgatcagctagctctagctctagcaaccagagaagaggggagagagagccagtaaccttggtttcgcctcccgatctgagagacgagatgtggaggcgccgccgggagagaagcactaaaaccctagtggcagcctgtaaagatatatctatagcagcggagctggcgcagggcggaagaaatatcctactggggcgaatattcggccactgacccgcctggttttgtcgacgcagattagcggcgggcagggggatcatctagagtc

SEQ ID NO: 9550 - DNA, 868 bp, Zea mays
tgactcttcatgtcgattgcgtccagacaattttgaccggactggtttgttattaggagcagacctgccgtttccatgtgcttgcttcacggagcacggcagctctgtaaacggcagactcgacgtagcttgcacgcacaggggttttcagctaaaaaatcctctagcgacagttcattggttgcccagttcaccgactgcctttataaacagggagctcgagctcgagtggtagcagcacaggcacaagtgcggtgccataagtgacagccacctcagtctctgtctgtggagctctctctcgcgcgcgttgccatctcgcaggttcttcatctcgtcgctctgttcaggttcatcggctggcgttagcgtttgttctctctcatacgactatttcatgcgtcctctgctgcatctcttcgattcatccgtagtatcttctttttacagctagtttgggaacccattttcttaacaattctattttttttcaaaaaaatgaactaattttctttaataaaataaaaggtttctaaactagtccttaagtaaaaaaaaggggcggtcccgagcaaagtcaaacggtcccgagcaagcaagaaaccgtgtcgtcgattctcttttctctctggctttccgtggcagcaagaagaagggatcaaaggaccggacccgtccgtccgtccggccggcctcctgatcgcgtcgcgcgcgcccctcgaaaagccacaccccgccgtctgacctcgtggtgaacagtccgacagtcgaaagcagtcgaggtccggagagcaaaaagcgcgataggcgtcggcgcaggagggggttacagttgggcggaagcctacacgccgcatgatctccaatt

SEQ ID NO: 9551 - DNA, 759 bp, Zea mays
tgcagagcaatctcagcaaacttctcttcgcgggcagaagaagcttttatgaactttatgctttcacgaatgctgtatacaacaccatgaattgaagcaatgacatctagggcaacagcattaaggatatgggcatagcacctcacaacaaagagctgtcccttaagcatgagattgttcttgttggagagatggtccctcagatttgcactgtagatatcatgtgaggagcattcattatccaatgtgatggtgaatagcctgtccttcatattccagtcagaaaggctcatgctaattgcctcactaagtgcattctctgaatgaggagatgacaccatcatgaagttaagcattcttcggtgcactttccactcagagtcaataaactgccctgcaagtgaaacgtacccaagagtctgactagttgtccacaatcctatagtgaggctgatccttccaggcatactgttgaatgcttgaagcaggttctccttttctttctgataaacagcatatacctctccttccatcgtttcaacatccacaatcttgaaacgtggctgcagactttcaataaaaatggcaaatgacggctgttgaacaatgtgaagtgggtagtcatgctgaatgatcaactttgccaagtatgagcaactgcggtcctgatcaaaagcagcatttgcataaccagtgtatctgtagcgtctcttggttcgccgctctatagttccctcgccatcattgtcagtccctcca

SEQ ID NO: 9552 - DNA, 928 bp, Zea mays
tggcgaagccgctcggtttgccccagagcctggccgctcggttgcacggcctgttgatgtggtacggctggtcatcgccaccgcagcacgccgtgagggggtcaccgatgccgaacctgtgcgggtccttgacgaactccatggcggcaccgtagtagtcggcgtagatgagcttcacgccggggtgctgcgccctgagccggtcgacctcgccgcgcagcgcccggttgtgcctctgggagaagtcgttgaaccaccggaggcacccgtgctcgtcgtagtccgcgcggttgccgctcctgtacccgctcaggtatgtcggtacgcagccgatagggaagttgttcgggatcaggatcgccttcgcgcccatgccgatgagctcctgcaaaaaaaaaaaaaaaaaaaaaggatgcatggcacatgcaatgcaagctccgttaaaatgactggaaaaacgaatgcgcagtcgggcggctcacctgggcagcagagccaatggtcgcgacaatgtctgggatgaactggccggcttgctcgcggggcctacgggcagcgaaccaaaagttgtagtcgttgccgccgatctcgcccagcacgatgagagactcgctcaggatctgcctcttggcgcctgacggaatgatcagtcgattgggcatatgaacggatgcctcttggcgcctacggggcactctatatagaattgtatatatataaagtaagtacctaccatcccagggagcaattcgttgcagcatttgtttgaaccatcccatctgcacgcccacgtaacaggcccgcacgtcgtggttccacctgcggtagtactccgggggcatcgccgtggagccatacacagcgaagtttgcgcctgtcgggaatagccccttgtccttctccggcagatttggtggtatcagcggca

SEQ ID NO: 9553 - DNA, 1329 bp, Zea mays
ccctcccctgtaaattttcgatgaagttttcccgagttctctgttttgatcaccacatcatctacataggcttccacacgcttgccccagtgatcggctaagcatgtttgaatggctctctgataagtcgctccagcgtttttgaggccgaacggcatggaggtataacagaaagcaccaaacggggtgatgaacgctgttttttcctcgtcttcctttgccaaactaatctgatgatacccggaatagcaatctaagaaagacagcacagaacatccagcggtggaatctaccacctgatctatcctaggaagcccgaagggatccttcggacagtgtttgttgagataagtatagtcgacgcacatgcgccaatccactttattctttttgagtacaagaacagggttggctaaccactcggggtgtaatacttctctaataaatccagccgcgaccaagcgagctaactcggcacgaatggcctctctcttgtcgggcgtgaaacgacgtagcttttgccgaatcggcctcgcctgggggtagaccttcaatttgtgctcggccagttctcttgggactcccggcatatccgcaggttgccatgcgaatacgtctcggttatcttgcaggaactggacgagcgcgctttcctatttgttgttcaaactggagctgatgacagccgtcttgcgctcgtcagcgaaccccaggttgattcttttggtttcttcagtcggccgcatagaggtcactgcctgagtttcgtttgctggtactgcgaggccttcctcaggcttagagttcgccgatgtagaaggaaccgctgacggcttggtggtgagggctgcctgaatggccactcggaaacattctgcggcgccttggaagtcggcacgcacagttatgatcccttgcagtcctggcatcttcagtatcatgtatgtatagtgtggaatggccatgaatttggccagtcccggcctcccgatgatggcgttgtacccgcattcgaagtttgccacctcgaacctcaggaactcggttctgtagttctccggagttccgaaggtgaccgacatgtagatgtggcccagcgggtattccccttcagtcggcacgatgccgaagaaaggagtgtccgactcgtggagctctctgaggtgaactcccaagccttggagtgtacgggggaaggtgacgttgatgctgctccccccgtccactagcaccttctttacccggctctctcggatcaccggatcgacgaggagcgggtatttgcctggatggtcgaagttaagccactgatccgggggtcctctagag

SEQ ID NO: 9554 - DNA, 941 bp, Zea mays
tgcagcgcctccttgggctccgcgacgtggaggaacgccatctcgtcgccggcattgggcccgccgaacgcggcggcggcgccgtagacctcgctgaggcagtcgaaggccggcggctcggcgcaggaggcggtgaaggtggggaggacgctgacggtgggcgcctgctggttgtggaaggagcagtcaatggcggcggccgccgccggggcgaagaggtcccccatggacacattgcagtcccaggcgtccctgcgcagggagaggatctcctccaggaaggcctgctcgtcgagctccatggccgcctccgccgccttctcctcgaactcgaatgaaaaagggaggtgtgtgtgcctgcggtggagggaggagacggacaacgggggattaagatacgggggaatgaaagggggggacaattattccctttgataaatggtgaacagttgccattaaggtagtaggctgctagtaacaaatatgtacgtagtactacattaatccatggaacttgctgctgatttatctgtggtgtgtaccgtactagtcgcagcagtagaatgcagagaggccccccaatctgttttttgttgtattgcgacctgtgaaccccaggcctggcctagctagggcataatgacagtgctaggctccaggaggattcgtcctgggcgtcgggtaaagctctagtctctgccctgtgaatctgtgatagtgtgtgatgatgcccttcaatctactgactgagtaattagcgggcacaggcaggctttgaaagctccaacgctcatgactgactgactgagactgaactcttgatggcatatattcagagatgacagaaactcttggccacgcccacgcccacgcccacactgatgaaagccaagccatggagttcctccccttcatcctcgctgtcatgccatgccacggca

SEQ ID NO: 9555 - DNA, 944 bp, Zea mays
cgaatacgagctcggtacccctgcgtcatttcgccgagctgctcgacccccgatgctatggcgatggcgatgggccggtcaggtcaggacaggacatgcgcgatcgagaggagaagagcacaagacgaggcgtggtggcttgttcaggatccgcacaagacgggcagcaggagagtgatggagggaagcccgtcgacggagcgaccgccacctcctcctccactctcggagatctgccggaatttgtgggctgccactactcaaaactaaacccctgaaacgccggagatcgatgcagatgcagtctacgggtgtctctacatgtcacggcaaaaagaacacacgcacaaacaagaatgcaacatgaacatgtgcatgttttcttgccaagaaaaacagctaacaatcctgcaggacgtgtcacgtactcacgtccggtcctccactcatcatattgcagaacctgccactggcatgaactctctctctctccttggtttgttcacgtcacgtcctgcttggctcaccgtcactgctccactcatcgtcgtcgtcggagtggcctctcgccgggatgatgaacacgtcggactcgtcgggggacctgaagctcaccctccgggacacgctgtgcaggctccggagcgacgcccggctgacgacggacacggacgcgctctcgttgacgcccggcgcggagtagccgccgccgctcccggtcccggagtccgctccctcctcgtccgagaagaagtcggccaggttcaccgggcacaccttcggggagctgcgccgcgacggcgtcgcagcctccgccgccgtctcccagctcggcggcgggtacagcatctcctccagggtgagctgcctcgcgtcggctccggccgccgccgccgccgccgccgccagggccaccctctcgccgctctggccttggtcctgca

SEQ ID NO: 9556 - DNA, 892 bp, Zea mays
tgagagactggagcaaatgaacttgacaggatggcagcaggagaacgatgacgacgacggcgtgtttcctatccaccaacaggtgcagtttcttccaaaattatcgtttcttactcgagtatataaattcatgtagtattatatttcttccatctgtagcctgcacaacagaaccgaccaggagtccagaccatggacgatgtccagaaccagcagcatggtcggtccctgttcatgcagcccggcccccagacgctcaatgtgccgcacaacaaccccatgatctcccccgacgctggctggccgagcagcagcaatgtcgcagccttcgctggcgccagcaacaccaccggcccaacactgctgcagggagtgtaccaagcaccggcggcacgaggagcaagagcagcatcgccggcaccgcatgcggtgtacgcaccaccagcgccaggactgcgccctccggtgtatcagcagcagcagcaacccatggcgcccctctacgacttcggcgacatggtcgcaccgcccgcggcagtaccactaccaataccaaccatggccgccaccagcggacaccagccgcagttcaccctcaaccatcaccaccagcagcagcaggaggaggaaatgtttgcgccgcggaggcaaggcggctggatggggagtcgtcgtcgtcgcgagaccggacccatcatgctttccttccagcagccacaggccgctgatcctttcacccctatggctggcagtggccctttcacgcctatggcggctgggcaggctggcagtggcacggcctttggagcttcatcacctacaggtgctacagatgcaggagcgtacggggccgctgccgtggcacaggcacagcttcagtccacgaacgctg

SEQ ID NO: 9557 - DNA, 883 bp, Zea mays
ttttcggcaccctgcaccagcgaatgatgacttccctgctcgacgatcctaccaccatttagcacaacgatgctatccacatgcttcatcatcgctgccctgtgtgcgatcagaatcgttgttttgtttcccatgatcaatgtgtcaagggcttcctggaccaccctactcgactcagattcgatagcggagctggcctcgtcaagcagcaaaatgggcgcattcttcaacaccacacgagcaatggcaatgcgctgcttctgcccgggagtcaaatccaccccacgcattcccacatgtgtatcataaccatgaggcagactactgatgaagtgatgggcattcgcgatcctggcagcttccttcatctcagattcagttgcattgtgccttgcatatattatgttctctcttatggttgttgaaaatataacaggatcctgaggaaccaaccccatgtggctccgcagccatctcaagttgaacaacttcaaatcacgcccatccaacaaaacttgcccagcagttggatcgtagaacctctcgatcaaagaaattattgtgctcttcccggatcctgatacacctactacagcaacagtctgtcctccactcactctgaggctaaaattactcagaaccatcatctcagggcgcgtagggtagcaaaattcaacactcctgaattcaatgctcccatacacgttaggtggtttcaggccgctggcatcatctggatcaatcttgggtacacgatcaataatttcaaatactgaggtcagggatttccggcgtttcagtatataaggggccaggccaaatggttccaccagtgcgaaagtcgcaaaagagaagtcaatgttctccttgccagggtaccgag

SEQ ID NO: 9558 - DNA, 877 bp, Zea mays
tgctcgcctgctgcaaacgctggagccagaaaaaagatctcccggagcaatggggccgcccgcccacaagtattattatccccacgttcttgccactgattattgtctccaagtcatcattatcttcccgtcaacacgatttgttcagtaaaaccaccgaaccaatactgacgtcataccaagtctcactcaaaagtcaaaaagaggaggggaaaaaagtagtagtaataaagaagcaactttacggcgcgatccaaatcgatggaatcgtgatcatgccgtcacttcccttcccttgcaacgataggaagacgctgcgatagattaggccttgttcggttattcctacagtacatagattggatgggattggaaaaaatttagaacaactttgacttgcttgggatttaaacccacccaattccactcaatccacatggattgagagctaaacgaacaagcccttaggtggtcgggcaaggaattgtaatttaatttgactcgatgaattgcttcttgattgaataggcaaatttacattcaataatctgtacaattgatatccaattccgggagaaccccaagtgaacgaaaagatatgttcgtctcccctgcttcaaatccaatctgcaagcttctcttcctcgttcttgccagcgaagaggaggcatcattgcatttggtccttggagcatcgattcgaatcctattagtagtatcagtagcactagcagcagcagccgacgggcggctaccggcggccggccaggcggttgagccaggcgttgcggagctggagctcgacagggtcgccgaagcactgcgcccgcgcgaggcagaagtgcgtgcagaacccggccgacgagcgcacgcggca

SEQ ID NO: 9559 - DNA, 901 bp, Zea mays
tgatgaagcaccctccaatccatgaccagacaccttttcagctatctctcttccttctgtttcaagtacaatcctgtgtaatcattcaagaaaattaggtataatgccacaaataattacatactaatgtgggacgttattcatctctaagcttgagaatgatcctattgctaaacctttgaatccagtgattaaaaccattacaaaatagacgctcggatattactctattgccatggcccccagttcaaaaaaaaaacatgcggcagatgacagtcagattatttcagagcaaaggaagaataataaatgtacacaataaagggaacaagaaaagaagccctaatatcatgtatgtagtaagataaggatttaccctccatcaacaatttcatcaaggcacaataggatcatatccaaattctcgagtgctgtccttttgtcaaccatgtttctgaaaccaccaagattggaaacacattcatatacaatcagcattaacacaacaacatgtaacagaacaaaacagtggttgcaaagataaagtttaatagagggaaaataacttgagaagtcgttcgacagcatcagagaatccctgaagaactgatgctaaaataagctcattctcttcttctcctccagtaacaaaaaagtgcaggtcttggatgaacttgtataccacaatttgaccgtcaaacattacaatctcaactgttaaagagaaacaaagaaaaatatgaaatacttgaagagaagaacaaaaactcaaacagtcatatctgcatgtttaaggagaaatcaaggtcagtcagaaggaaaactagcccaggctcatttacagatttgtggcatgagtgggagctcgtacaaacagtgttatgactgaggttagtagagc

SEQ ID NO: 9560 - DNA, 1315 bp, Zea mays
  unsure (1)..(1315): unsure at all n locations
gatcgctctccactacgccatcaatggccttcgggccggcgtcctctacatccattgtattagggatccacccaagagcttgcaggagctatatcagctcttcgaaaaatatgccaaatccgaagagctccaccagcgcaaggtcgagtcgcaacggaaacccaacagtcagactccgcagtccaccgcacgtggacaaggacttcgcagccagactccagtcgagacagccgcagtcagcagcaagtccacaacatcgtcaaccaacagcctgctgctgacccccctcgccgccaggaatatcccccccaaggccgcggaaatggaacgcgcggcaggggtcgagggcgggcgcagcagccgccgcgccggttctattgccttttccacggcgaagactgcgcccaccagaccaaagactgccccgagacgaaggccaccagagatagaatggcgagggcgcagccggccgacaatcccagaattgtcgcgcataactaccagccaccccctccaccatacgtccacgcccccgctccgcatccaccgcaccacgcttaccaacatcatcaggaagtacaaatcgtacctcctccacccccaccaccacaccagcaacaccaaaacattccccatcccccaaagcaagaagacttcgccgatcaaccttatcgcggagtcattcacatgataacaggggggtcaagcaccgacttcgacacaaagcggcagaagcgggaccactaccgcagcatcaaccatgtcgccgtcactggcccagtcgtgcagacaaagtggtcccacataccgctaaccatcgacgcgcgagacgtcgacctacgcattgccccccacatcgacgcaatggtcatcaactgcagcgtggcaggcttggacctgcacaaagtcctagttgacaatgacagtcaggcggacatcatcttcctccacgccttcgatcgcatgggcataagccacagcctgctcaagcctttggacaacccgttgtatggcttcggcggcaagggcacctttcctgtcggcaaaatagagttgcccctctccttcggtgtagcacccaatgcacgaagtgagcaagtgacctttgatattgtggatatggtatatccatacaacgccatcatgggccggngctccatcaataagttcgaagccgccattcacggactgtaccctatgtatgaagatatcaggtccgttagggcgttaattacggtctacgggcaaccaacaatacggccgcgcaaccatagaagaggggactttcgtgccccggtcagaagaaaacgtgcac

SEQ ID NO: 9561 - DNA, 896 bp, Zea mays
tgcatacctgtctacagtcactacagaatcctacaagaattatttggatttacatgtcgtcagttgtataggactcaaatgaagtggcagagccaagcatattacaattactgatgtgttaatgtcttaaatctaattccctattgcagatcacaaattgccattttcagcggacaaataatcgattgcacactagaattcattggtgaactttgcttaccaagagggcgtgttccagaccagcatcaagggcctggactagacatttagagagatgtttcacctctgcccaagaccacatattatcagaggaaccatcaggggccgcctccaatgcagtaacagggaggccacaatctttcaacagatccttgcttcttacatcagccatttcctccagtgattttctaaggcgccgagcttcaccactttcttcaagagaaccatcggatttcatttgagtcacttgcacatcagacatcaactctgacaaagtaattgtcaacatgactctcaaccttgtagtgttcttgaaatagttgaatgcgttctagaaccacaaggacatctatatcagtatcattcaattgaagaccagataaagctaaaattcagttaagcagcttaccctaacgagaatctgcaacccaacaacagctcttttcctaatagaatcatttcgaaaaacagcaagccgcaaaaaatgaaaagcaatttgcttcaagaagcggtcattctcccttgccattagtgttgcaccatgaagattaaatatgttgtagaccacaggaaggaaagccttccaaaatgccaagggttggctcctagataaaagacccattacgatagatgttacacaatctagcttcgcataatcagtagtgatgcttctagtg

SEQ ID NO: 9562 - DNA, 844 bp, Zea mays
attatgtaacagcggccggctttgttggagtcatcatgcaactgaaattttgcaacagaaagggttgaaaagtgctagtcatagccggtatcgattgttatgtgatgaaacctaacgttgcaatagcttagtttcacaggaaataaataacaacaattaataagtttactgccctaacctgctagcaggcctggaatgcaagttcagcagggagcatttcttggctgagtagtagttggattattgggtttggatcctatggaagctgcgtattgttctcttagggctcgtttgtttcgttggaattgaattccattttaataattataatttagacaaaactaattaagattatatatttatatatgtaatatatttgtatattatcctaaatcatatgagagagatagttatatactacatttatgttatagagacgcaagtagaagaatgtgctataagttgtacatcggaaaatagcatgtaaatctataaaaccattttccatctctcatcccatgaatttgaggtaggcttatatgataactttggaaagtggtggaatgtcatattctaaaaaaatagcctattccattagtaagattccaatttctcgaaatgaaaggaaacaaacggggccttagggatccagtaattttgaacatctttgggaaattttctggaccaagctaattttcttctttttttttaaaaaaaatctacacaggaccttgacgcttttcccttttcttgttctgttctttcaggtcaagttttcaccgatgtagttggtagcccatattatgtagctccagaagttctgttgaaaagttatggacccgca

SEQ ID NO: 9563 - DNA, 891 bp, Zea mays
ctcggtacccctgctgcaacataagtggctctacctcaacaatataaacataatcacataattcagttgttgagttaggatctgcttggttgtctaccacaatacaacatttagctgcaattacctccgacaaagagtggcaagacagccggtgtactaaaggggtagatttgacaacttaaccaaaatacagtatggcacatcagtggaaaagcaaccaaaaaaatgcgacaaaaagtaaaactttccagcttttgtgtatcacaacacaataggagtgcaatcttagctcttaggccacacgtttggcatgcacctaacataacctaatcccatttacaccacagattcccagatagctgcttgtttgactgacacgattgtggtcgcagacattttcctagcaccctaccctacacatcatatgttgagttgttgactaatttcgcgacacttgtggaaaactatatgttagttacactttgcctacatcacagctcaagaaagaacctctttttcataaattttccttcatgtgatagctcaaactagcaggaagtctcctatcaatatgccctcatatgaagcaacatattacctccaaactttttttaaataagaaatccaatttctataacacagatttcaaagctgcatactgtaataaccaagggtaatcacccagacacccactaaccactggatgccagagttacctccacatccatgtccaaattgtaatgaaaaattggacactctaaatccaaatcagattctgaagactatatctcactcggagtagtattttgcacagccatacttatttgccaagccaaactcctgaatacatgtgccatttgaaacaggggatcctgaccaccagggccatca

SEQ ID NO: 9564 - DNA, 866 bp, Zea mays
tgattattggttccgagggctctgtagttgcttatccacgctcgcctatgcctttgcgctgatcttgacaactgagtactcaaagcttggatatggctacttattactcgagccctggcagtgaaagagattcacaaacaatgtactcagcagagtcaggcaatgtatcatatcccgtgccatcagccctagggaactttctttatctgaacaatgcatcttctgggccttatacagaatttaatggaattgtccagcctcagcagaatttcatggaacttactggtcatccttcagcaatgtcacatgattcgtcatccaacgaagctactaacattggcacttcactgacagaacagcgctcttttggtcctttgaaagatatgagaaatgagatgttgatgcatttgatggatggagcacacagcagtggcagtgacctcatccacaatgatgctcatagcactgcacagctcgagtttggcatgttaaacaaccacaactcaacaagtcttccatcagcatcaggccaagggctgtctctgagcctcaatacacatatcttggcaccttcctatccacactggtctgcaaagcaggacttattaacaccaaattcttaccagggtgatgacaacagaatgaagaatatgcagtctgaggcttcacatgcaatccggaactctaagtatctgaaggcagcacaggagttacttgatgagattgtcagtgtttggaagagtgttaaacagaaaacagataaaggcccttctgaagcaggaaagtcagatggaaaagagactgatggggggattaaaagtgagggggtatcttccaatccacaagagtctggtgccaatacagca

SEQ ID NO: 9565 - DNA, 892 bp, Zea mays
tgcctagccgcaaggtgctaccgcgctagcaggcgaggagagcaggctagcagcagtagtgcagtacgacagcgcagtccgcagccgcaggtagggctgcaccacagttcgggaaaaaatggctaagatttattctgcagacttctctcaatatgatctcttgatccttaaagaccaactcgatatatttattgttgatgtgaggggtaattctgattttgcaaattgtgaagaccttggtaatctggctattaagatggtgcaaaccgagagacacctagtttttgcattggtttatcgtctcattgaattagccttaattttgcttgttgcaactgccacggttgaaagagtcttctcagctatgaaaatcatcaagacagaactgagaaataagatgggaaatgattggttgaatcatagaatggtatgctatatagtaagagacatctttgcaagtattcaaagtgatgatattttataccattttcaagaattgaagagtcgaatgaaaaagctagctccacaaagttcaagtggtatatttttgtactcacttatacatttttgcattcattagttatattgtcatgttgtatctcttattttatacaaatattgaacttgtaatgtgtaggttcaaattcacgtgctattattgatgaagttattagatgcggggaaggaccaaatcgtctctaattaggtacttttatatttttaatcaagtttattgtatttttagatgctgaattgaagtaaaaactatcttagtctatgtttgtggtatatttagttttaatggtataattagccacacaatatattaggggtgtttaaagtaatctttaaattttatataatggtgacgtgaattttatatagcttcgca

SEQ ID NO: 9566 - DNA, 865 bp, Zea mays
tgcaaagttgtattaggctcaacaatttgatctaagattaataatcatatagtgattgtatataaaaggatataatttttagacaactatactcagagatatgcctcttcttaagagcgtcatctctgctaaatgatttgtagaggtcaggaaaccgtatgtgaagattatcatttacagaggtagacatcgcaatgcgaccgttaattcacaaagatagttattttaggatacttgaactgtaaatgattattagaggtggacgtttgtctagcataggtggtgtggccttttattgagggcgacttcaaaagaactatcttcggggtcatattagaactgttttttctttgggatcaacatattatattagaactgtttttttatattatgcctatcatctgagtgtagagtatggggctcagcacttaatcctggcgcgcggtgggcatagagctattacagcatctaaatgactctagcacgcggcgattgcacagtatagccacgtactccgtacgtacgtagatgggcctccgctgacgaggttaaggccttgttcgtttgtaccagattggtgggtcggaacgatttctaaccggattgtctgtttaatttatataaactttgattatctaaaacgatttcgggtgcaatccgacacaaacgaaaaggcctaatttggtgccgtgccaagcacgacaacacaaatgttcggaggtaactagtacacaggtccttttgtgtttgtccctaactttgtgaaaaaaagcccttaattagatcgtgccagtcgcaaaaatgtgttcacggacgattacatgccacggagacaaggttaataagaaatccttttgcgttggca

SEQ ID NO: 9567 - DNA, 1449 bp, Zea mays
ctcggtaccctgtgatttgagtgttaaaaatttgcggttatactccctcagagtctccttttctagctgcttgcagagcgagagttcggttcagtgcgtcggtgtctgggcggtacccttggaagttgagcaggaacttgtcccggagacttctccaggaatcgatggacagcggaggcaacctggtgaaccaggtgagtgccaggccctcgagggcgatgatgaaagacttcgccattgtggcatcgtcccctccggaagatgtaacggcgacctgataactcattatgtattgagccgggtcagtgctgccgttgtacttgggataggtccctgcccggaagttagctggccaaggcatcacttgcaggtgtggcgccaggggacttcgctcgtcgaggtagttgaccccttggaatggcgcggcgtgtgggaaggtgtggtcgcgctgggggaaacgcgggtcttccagttgtgcgcgctgttgcaggggtggcccatgctgcaggccgaggtggccttcgcgcatgtcttccagttgtgcgcgctgttgtaggggtggcccgtgctgcaggccgaggtggccttcgcgctgcatcagcgcgatctcccgctcgaggtcctgggccttctgctcttcgtcgcgtatcatttgtcgcaccttggctagtgcggacacgcgctggcgcttggcctccagtatctccttctgcctctggagattgcggttcttgaggcgcagggcgcgcagctgtagctgttcttctgttgagacgccgaggacttcaccgtcctcggtgaggtccgcgccttccagtggggcgaagcctgggggcggctgcgattgtccttcggttccgcaggtgcggaaggtgtcgtcttcgcaggtgcggggaacattgtcttcagtgggctcttggtgggtggattgggtgagggcgagggccttgccctttcttgcggccagcagtgctgccttcgcagcctcgtcagccttcgggttagctctcttaggtgccatcgcgggtggttttgtcgtagcacgaacggtgggcgccaaatgttggaacttgctctcagcagcaaggaggccaacaggggtgaacagtggtgacaacagggttacgtgctctggggcaatagctctgttcatctagcctctcacgggcactgtgcgggggtatttataggtatctgagcgcccaacgccttgtgttaaggacgcatgtgccctcagacacctagtttatccccagaatattcccataaagcagggttacaagctgtaattacaagtatgcctttacaagttaggcccgtaacacacaacgaccgtgcagggccccgttaccaatgggcccggaatcgtaccgtggggccctcccaaacctgggaccgaagggcccgcaacgggggggggagggaacctttcgtcgccaagggcccttt

SEQ ID NO: 9568 - DNA, 1123 bp, Zea mays
tcgactctacagatcccctggcggaagaagaggatgtcgaccggcttccagaggtatgtgatgaattttggattatagcactgctggccgagaaaaagggcaaggcccttgtcgacaccacccaccaagaggcctgcgaagacgacgcacttagcaagaggcagcgcaacgagcaacccactcccgaaggcagtctccgcacctgcagctctggaggacaaccacaacttcccccaggcttcgctccaccaaagggcacggacgccaccgaggacggcgaagtcatcggcgtttcggcagaagaacagctacaactgcgcgccttgcgcatcaagaaccgcaacctccagaagcaaaaagagatcctcgaggccaagcgccaacgcgtgtctgcacaagccaaggtgcgacagatgatacgtgatgaagagcagaaggctcaggagcttgaacaagagatcgccctcatgcagagcgaaggccaacttggtctgcaacacggcccacccctccaacagcgcgcacaaatcgaagacctgttcattcctcagcgcggacacgccgtcccgcacgccacagcgttccaaggtgtcaactaccttgacgagcaaagtcccctggcgcctcacctgcaagtgtcaccatggcccgccaacttcagggcggggacgtaccctaagtacaacggcagcactgaccctgcacagtacatcatgagctaccaagtcgccgttgcatcatccggaggggacgacgccacgatggccaaatcattcatcatcgccctcgaaggcccgtctctcacctggtacaccaggttgcccccgttgtccatcgactcctggagaagtctgcggggcaaatttttgctcaacttccaagggtaccgcccagataccgacgccttggctgaactgtcactctgcaagaagctagaaagagagactctgcgggagtactaccgcaagtttctgactctcaagtcgcaactgccttcggttgatgaccaaatagccattcactacgccatcagtggccttcgggctggcgttctttacagccactgcatcagagatccacccaagaacctccaggagttgtatcagggtaccgagatcggatt

SEQ ID NO: 9569 - DNA, 868 bp, Zea mays
tgaagtgaatcagggaatgtcatacctgactggctataaaaacgtgaggagctaaaactacaagaaaatgcccgttgtggtcctcataagaaaaaaaaactaacttttcatactggatggatgaagtcttggaaatcaaacacatatccgaatatgtttcgctagatcatgtggcatatatatatgtatgctgcctgtcgattgaaaatgaaaatcgtaacaaaaaatacatgtagggtacttgttcggttatttttatttcatatggattggaaaagattgatatagattgaaagatattttgatttattatggattgaaatcgactaaatctcctccgatctatatgaaatctcctccaatatatatggattagggttaaaacgaacaagcttgaacttgaactggagatcgactcctatttgtatcgattccataagacaatattgtttctaaaaattaccatattataataaaagcgggtaaatttctaaccgacggataatcgttttcgtgtaggccggtgcccgacctcatctgtcatggataacacaagatgtaattgtgttccttgtctttcgggaggcgcaaggcaagacgcaagctctcacgattcggacgcatataagctagagtaatatatgtgaattcatctcatccatggtattgtactagttagtgtcctttttcctgcgatcgacgtgtagctaggaagatgcatcatgggtcgtggccgtcaatggatgcacgctccggggacggtccacttggcctggtgcttggcccagtgcggcatggcggtgtagttcttccagtcgtggagcagggtccggaggtcggtgatcttggcgcggaggccgacgcagca

SEQ ID NO: 9570 - DNA, 891 bp, Zea mays
tggacaacatcagaactgatctatcatgccttcagtagtgttctgtttattaggaaaacaccaaagcacgtcttcttgcgtggaacaagcgtactgattccttgggctacgtgcgccgccccacatgctcctccccttcccgtctccactccactcaactcaccagtggcgtggtggggccagggtacgtgtcacgcaccaatacaccgcaagcaacgtgttgggccactgtctcgatggctccatcagacagacaatcacactccactcatacatactctgtacaggcgagagggagagagagatcctatcatcagtcatcctaatcgccggtccgtcactcttgatttgcggtccaagacgcccacggtgactaaacaagggacagcatcatcaattaccgggcgatgaaatggggcgcgcaggcgcagacatgccgtccctggcagccgacatgtcaatccccccggcgccttgacgcagatcgatcactcatcgctcgccggcccgcccactagaagcggtcgcgctcaggccttcaggtctcgcaattcccggagattctcggggacactagcgcctcaccctgccacccatccatccatccaccccgcagcccggcgattgcgatgtgatccggtgcttctgctgcgcctgcgcggcagcagcgcaccgcacgtatcgacacgcacgatcgacagtagattaggtacgagagcgagacagaagaacatgcctccccattctttcacccactagtgcatgtagtgtagtatatatactacgtggtactagcaggaggacaagtataagtcagccacgccaaagtactagcaggaccagtctgcggtatgcatgcacagctcagaacgccgatctcgaatcttgata

SEQ ID NO: 9571 - DNA, 1447 bp, Zea mays
ttgattgacaccgtactgttggactgcgtgtttcccgaagcgccgcgcccggtgtataaaagggggcgggggcggcgcgttttgaactttatctttccgcgctccgtgaaaaccctagccgccttttccaccttcttgctgctcatctgccctccttgctcttgttcaccggagatctggcccgagtgaagcagaccgcccgccgccgccgacggtacgtagcgatgccgacctcttcttcttctgctgccactacgttgccggccgacgcgtcgtctgaggagacgctgggcactgtagcggcggaggagttgcgcgccgacgatacggtggatttcggtgtgtcgcggatgtcctcggtccgcgtgcaagatatgcagcagcttggttactttggcggcggagtcgctcgtgtcccggggacagaggaggtccccgagccggaaggcgagttggttgtgttcgaggcgttctttgccgctggtcttcgcctgcctgcgcaccgatttgtgggagaagtcctgcgcagatttaacgttcagatccatcagctgactccgaatgcccgtggtggctctgtcgaagtatgtctgggcgacgacttcgtacggcggatagccatcagtcaaagtctttgcgaagtactattgcctgcactggcagaagaggatgattggaaatgaagttgcccagtttgggtcctgtacatttacgccgaagaccggcaagaccacgatggaggtagtcgagttggttccttgcgcccgcaacaagtggggcaactggcatgagttttggttttacgtcgcggagggtaccatcgaagaccatgaggggctccctgtgtctgagatgtgctcgcatttttactcagcatacccgtcatttgaagtggcggaggaggatgcggacgaaggggcccttcggtgcgccgccggcctgagcagcgggcgcgatttggttgaggagtttgtggcgtacggggtatggcctttggcgcatggctgggcgttgggcgaagtatgccctcgccagatgccttcccatggtgggaagctggtgcgaagtcccgccttcgcgctggatctgcatagccgcgatccggccgcctttgtgcgtgaggcggaggatggggcggtgcggatcgtcggtcgatacgtgccgaagacagagggccagcgtagctgggatattcgcgggtctaatgaccgcttgaacagggttttcgagttgaaccgtctaccgtatggcggttatccgggccaagacgatgtggatcgtcgcgggaagaaaccggtggtagagactggagacgaccctgcgccggcggccgccctgtcctctaagaagaggaaactaggtaaagctgtgggaggactgggggtttctgatggtttttctagggaattgatgaggacatgcgcgggggatccatagagtcgtgcgc

SEQ ID NO: 9572 - DNA, 858 bp, Zea mays
tgaccatgttccctgcatcgtacagaataccttaagggggcgttcgattgtgtgggaacggtgacccggaacaattccgagccacattgcttttctaatttatgtaagttttgatgaacctgaaaaattccagggccattctgggagaaacgaacagggcctaactgatttcacaaggtacgccatttgaccactccgtcagtaagacaaacagaaaagttaacattaacaaatcatctcatgaaacacgggccaagtaattattaaaaatataaaaatcagattagttggggcacctaacttagtttgacttaactacactgggactgagtgtttagtgtttagtggtagctaaaaaaataactccaaaatataggcaatctatagcccagaagaggaatataataatagaaaggcaatgacaacgagctatagcgacaccagacacaagtaaaacaattaccattgaccacgaacaaaaaaataatgaagatctttctcgcatttgctaaaccgttgccaagggttatcgactcacggagcgcgaatgaagtgctccacggctctaccgcaacagtgccacctacgcccctcccttcgtctcctatgtttttttgtgacagtaaagttctctcttggatcaagtcagaattttgttcaggttttagacgaaaataatttttgtagcgtggatagtaagatagactttctccaccctcttttatgatttactgataatatacctcatttctttaatatttgtcgtcagttaatatatttttaactaaaccacgataaataaaaaagaatggaggaagtataaaaaatgaaacaatagggattaagcctactgtgaca

SEQ ID NO: 9573 - DNA, 920 bp, Zea mays
tggctggtcctccccccttgctctacacggcgacggacgccgggacccgagggaagatcttctggcccggcgcgaggatcgccagcgggtcgtaccgggccttgcggtccacgaagcgcctccacctggcggcgccgaagtggcgcgcccagtcggcctcgccgcggtagctcgggaagtaggccttgtagtcgtagccgttggcgcggcaggcgcggaggatggcgccgttctgcgccaccagctcgtccaccgccggcccgccgctccggcagaaccgcagcagcgccaccaggtagaagacctcgccctccggcagcgccaccgacgtgttggggtcccacctgcacgcacgcacacgcacgcagttcccttcaggcatcagcatcaggacggaaaccacacagccaggcccacatgacatggactgtgcgctagcctcgggtcgggcgaagcaataatttgtcaatcatagtactcctcctcctccgtaagatctgtgtgacacggctaaatccaaaacagaagcggcggtggaggctcgggaccgtcgtcttacaggtacgtacgggccggctcagcaactgtcccggaggaccaggcgtcagtgacacgacgagcagagagaaggcagggcggctcacatgcgtcccggcccctagctagcttggcgggccgcaaacggcaactgcacactgaatggcagtaccaccactcagccactcctgtactgtactactgcacgcagtgcgaaggagcggagcggagcggagggcaactcacttgctcttgagcatagggtagacgagcatgggcccgtcgatgccgtcggcgagcatgcccttgatgacggcgcggtcgaagtcggcgatgtcgcgcgcggagacgaagaggttgagccacgggtgcggcgcgtccca

SEQ ID NO: 9574 - DNA, 950 bp, Zea mays
ttgacatcacagtacgattttttcactgcactgactcctgattcctgaaagcttttaaataccataaccacatttttatcctgatatttcttattcagattccaattgtgaccccaaatgaagctgctcaattggctgcaaaatatcgtggacaagggtttcaaactctgaagctcaaggttgggaagaacttgaattcagatatagaagttctgaaagctatacgacttgtccatccagattgctcatttattttggatgcaaatgagggatacacagcaaatcaagcaattgaagttcttgatagattaaatggtccgtactcctgcaaactgtaaattgctagagttctcattttaaagttgtttcaatatgttgaacatgttagctacctgtcatctgaactgtacgcccttcttcccatgcttgaaaagttaacatgtttctttccttttattggtttcagaaatgggagtgacccctgtgctctttgaacaaccagttcacagagatgattgggacggtctccgagatgttacctctgtggccatggacaaatacaaagtcgctgttgctgctgatgaaagctgtcgaaatttacttgatgctcaaaaaataatagatggaaatcttgcccatgttattaatatcaagctggcaaagttgggggttcttggggcccttgaaataattgatgctgcaagaaaagccaatattgctctgatgatcggtggcatggttgagactaggatcgctatgggcttcgctggtcacttagctgctggccttggttgctttaggtctgtttgctgtgaaaattatcaaattatcattttatcagcaagagatactgtcatcagaatgctgaaaccacaagctgtacaatgttaccatgttcgatgtctatcctgtcaatcagggtctctaagcgacctgcaggcatcaaactg

SEQ ID NO: 9575 - DNA, 883 bp, Zea mays
tggtttgcatctagctctagccactgcagcaaccgacagttaccaatctcaggtgggatcagcccagtcagggagttctgtgaaagtaaaagatatgtgaggttgctgaataagcctataaaatttggaattttgccagacagactattattgacaaatccaagttgttgcaagctcctgcaattccctagccatgagggaatttcaccctttatattattgaatgacaagatgaatatttccagcttgcagttctcaaaactgaaagagatctcgcccgtgaaactattggcagtggcatcaaaaaccttgaggccttcgatcttactcaaggactctggaatactgccactcagttgattatggagtagatacagctcctccaacttggtgcagttgccaattgaactgggcaaaactccagacaacatattttcgtgcaaccacaatgacttaaggcttgtcatttcaccaaccgagaagggggtatccaaccactgagctgattgccatgtaggtacacttgctccagaaactggttcttgaacaactcctctggtattgttccattgaaagagttgtagtacagcgacagtgatgataatttcttgaggctgcccattgatgccggtatattgccagtaagcaagttttgggacagatccaattgttcaagcatactgcagttgcccaattctagagggatcaaaccagatatgttgttagcagataaaatgagaacctgcaggtatttcagacgccctatttcaggtcctataaaacctgagacctctgatgacgataggtcgagagaaatcactctgttccttccattgcagccaacaccgttccatgtacaaggagttgcatcagaaccactcca

SEQ ID NO: 9576 - DNA, 868 bp, Zea mays
tgaatcatgagtaaaaatctcctaagctgtgaagagagcctgcttacctaaaaccaacccccaaagcataactgacagcagtctgttaaataagaagattgatgatttaatcacataagttactcacatttaggcacccttaaattaatttatgttcattaacatcgaggatatgaggatgtacctccagagagaaaaccaggagacaatataaactacatgctgctccagttcctgcggtcaagagcagcaattcatccttgagctgcaagaaaaacaagggtattagtagatgaccatgtaattacccttttaagcaatgcatagaaaatgaaaaatagaacgctggaaaggaatcatactgcttcatatttcaaaagattcagctccttccttttgttgctctcgttctgcctttcctgtcagcatttgaaaatcattcccatttgtccatcagctattatcgcaatagcatcctcacgatcctaaacagtgaacagcatggatgtcacacctcagcagaaagcctcttgcttaaaggagggctgctgtcaccggacacccaatcactaatcgccgctagtctcaacattccctcgtccacagcatcttcccgcacctatatcccaattagattggttaatctctgttattaaagtcgaaaacacaggcatcgtgattggcagaactcacgtcttcaggctgagcaacatctactgcactcccttggcctgtggtcgcctcagccgcaccaacattggcgccattcctcctccagaccatgtcagagaccttggtgacgaaatcgccgtgcagttgcctctcctcaaggaacatgcgcagggcctcctccccaatactgtcccca

SEQ ID NO: 9577 - DNA, 890 bp, Zea mays
cccctggtcagagcgtgtggtttgcccgttatcatgcctggggacaaggtccccaggttcttcgcgaggccctgccctcacgagacgtctttgtgtttgccccaagctgcagagaagacggctggagttccgtcggagaccagatcatgcatgagccgtccgtcagtatctgtataaacacctgcatgacgcagttagctgttacggtgaccgactgtgtgtgtatatcatatgcttttggtaatacaatacaaagtgtgcaaacattccacttgtgatatatactatatacaagatttagacagtgttaggacttattcgttttgttctcaatctatgtgtaatagatgagattgagtgagtttaaattctaaacaagtcaaaatctttcataatttttttaataccatcaactccatatgccaaacaaacctggtgcactgcatgctcgtgtggaaataatcgtgcttgttgatgggcaaccaaatgagcccacgggcccagctacttcctctcggcccacgcgttcgcggtcagcaaggacgccgcgtcaccttccctccctgacccgacaaaccaacgccgcgtactcctctctactctctgccccgccaccaagctcgaccgaccgatgatcctcagccgcctgcatgtccgtgtcacccgccgatcccccgcgtccgccgccctccgcgatgcggcaacgcgcgccttggcctccgcgggcctcttccgtggcctccacggcggcgcctcctccgagcacggccgcgaacccgcaggtaacctcatcctcgtcatcctcctccctgcccgcgcggctgatcggtccctaattttcatatgagaccggacgcccgggctatagactagtatgggttcaagtcgca

SEQ ID NO: 9578 - DNA, 845 bp, Zea mays
  unsure (1)..(845): unsure at all n locations
cacgactctagaggatccccctgcgaggataactgcttctttggaatgtagtattgngaaaaaagtacaggaataggattggaatacatacgcaaaatagaggaatggaaaacatgaagtttataggaataggtgtttggctgaacttcataagaaacacagaaaacataaacatgaggtctgagtggatgtttttttctactggttttctacgaaatcaaacacaaaggaaagtttcctccgttttttcctacataaaatacttgtgaactaaaggacgatacaacagctcaattcttaggaatgtgaatcctatattttttctttgtttttactgcgttttaaaggagccctaagaatatacacataggagataatgtcagggtatcaaggctgttttgatgtcatcgaccattaaaaaattaaaacaataagtatgtaaaactatattctattattagatacttcgtatagatctggcaaaaaggcagccacacacttggccgcagttgtggcgctcacgaaccgtggaagtgcatacgtacgaacctgccttcggttggacacacacaagtaagtgggacccgactcgtctgtgtatagtatactgtacatcgtatatgtatgcatatgtgatgaatcatgcggaactcctttttaataaagggaatttgctggccaggggcggcaccgccggcttacgatttgttcaattctcgtgtgcttcgccctcgcaaacgcatccttctggcctccacctttggccacggccatttgatcggccaattgctaaaagtttgcggagaacgcgaggaggggagatagctggggctaccatttttgtg

SEQ ID NO: 9579 - DNA, 711 bp, Zea mays
tgacagtttatctgctctctcgggggagacattcagctaaatttacttgatagcgtatcattaatgctaatgtttagataaatttgggaatgatggtacatatcgtctcacattcttcctttgtcaatgtggatcttttgacataatttagacaactgaatgcagcaccagagatttggtatactaaataagttctcattgacatctcattatatgggatatagttccatgtactcaacggttcctattggacctaaatccatacctggatctcattaccttgtgaaagaagaaattcatttctatgttgctatggagaattgcaaaacttatgcccattattacttgtatctatactcccaaaaaatcgatccgtgagcccaacaattcatcggctcaattacccactcacccaaactgcttacatagagtccagaacatatttggcaatctgctcgcggcaacggttgcctctataatgtgtatgccatggcagactggtggatgcagacaccaacggtgtgaaggatcagtgggcaggttaaagtcgtaggggcgtggaatgcacaatcttcatcaagaagttccaggaagaggttcaccagggtcttaaacccttgaagaggcctagaactacaagtagagtgtctgtgaagggagatgtggctagagttcctctggagtccaacactgggcgtgggtatgatgtca

SEQ ID NO: 9580 - DNA, 916 bp, Zea mays
tgagccagcaagcggcaaggccactgcagacgcgcagagaaacaccggcttttctttcgccgtatgaagctggcgtcaagcaagtgaactcgtttctctctctctttccctctgcctagtgcctgcagtgcactgcactgtggagatcctagtcacgcacgcctcctctgcacgccgggcgccaacgatgcgtgccaacgccgtcttaaaacctcgccgaactcatcattgcccgccttgttcccttcccgctcgtcgtcttgctctgtctgccgggcgcttgcccttcccgccgtcgcctctcgcccctcccgacccgagttcccgaccgtgcactagaactagtgctactactgctaggtgtctgtagctagcaatgcaagagcaaagatcgtgcatagatcacgcgagattcccagcatctctgtgggtaaaaggaaacaacaaacaaaggagaattctgagagagaaaaaagagagagagagagagaggaaagcgcattcaaaagcaggctgcttttggctggccatcgcagcagcgtttaaaaacaaaaccattgcctaggtccggtagaaaaaaaaagcttcttcttttttcgcgagcaggccgtttcttttatctctctctctcttcttttccgactgcgcgtggcctcgaagcaggagatagagagatagagagggtaaaatgttgttccaggtcctgcacagtgactgacaacctgaccctgtcctaccgtgccactcatcactggtataatggtgcctgccaccgctcacgcacgcatcccatccatccatccatccatccgtcgatcaaccgagcctcaagaggacacactaggcctctcggttctcaagaggcctcgcccgtcgcatcacgcgggcggcagtataatctcccggtgacgacgca

SEQ ID NO: 9581 - DNA, 853 bp, Zea mays
gatccccctgcgccgtcaccgtcaccttccacgtcatcaacttccgcaccgatgtcgagttcgtgctcttctccggcggcttccggacgccgtgcgtcctcaagcggtccggcgcgctccggttcgccaaccccgccagcccgctctacggccacctctccagcaccgactccacggccacatcggtgagcaggcccaccgtttcttcgtccattctacggtgattttctgccaaactgtatctgagcgctggaagcaatggttgtcgccagatgaggcttacctgggtgagcggcgacgggaggccgcagcaggttcagtacggaggaggcaagtccgctacttctcaagtggcaacgttcacgcggaatgatatgtgcagtaagttgtggtctcgtccatttatcacagagagcagacgttactaagggaaacgtgactgtgtttgattctggaattgcttcgacgaacttatctcgatgcaggtagccccttgttaccaagccctgccaaggatttcgggtggcatgaccctggctacatccacacggccgtcatgaccgggctccagccttctcaatcctacacctaccgttacggaaggtaaagtccttttgtgactaagatcctcacaaactaaacaactgatcagcaatgcttcagaattagaaaatgccatggatgttcggaaagtttctaactttaaaatgtcagccagttctgtagtaacattctggcaaccaaaggagagatggatgtttcatctgttcacgcagcttttgggtttgtgcttgtgcagtgattccgtgggctggagtgacgcaaacacattcagaatgccaccagggggatc

SEQ ID NO: 9582 - DNA, 904 bp, Zea mays
tgttggtgtggaggtggcccgcaacttctcaaccaaggcgaacagagtcacctttgggatgcggcatgctctggaccctaccaccactgtgaaggcgcgctacagcagcaatggaatggccagcgccctcatccagcacgagtggagacccaagtcattctgcaccctatccaccgaggtcgacgtcaacaggtttgatttcttgcagacccccaagtttgggctatcactggtcctcaagccctgatgatgatgccgatcccccctagtcctagcacagtcaagtctccgtatcaatacttgaggtcgagtgaaataattctgaacctcagctctctctgaacttggtgtcatcctgaaagttcgcggtctccctagctggttttagatgttgagaactgaatctgcaaacgacaatgtgatcaagtacattactccgttgacacattgtctaaagctcggaatcttcaccttcactgttatcttttcgatgttttcaagtttggttcgtccaatatatcatttctgcctacggttgcatgctatgaatgtagaatcaccgaagtcatgttgtgggtggcaaaatacatctcttgacccatgatgaagattcaaattttatttcacacataaatagagttgtgcatgcttttacatagctccaaaatagaggacgaagctaaattttaatggccaatgtgcctgcaaatgatgggtggttctggatatatcgaatgttcaacagtagtcctattagataatcctatcgccgtggcaagtgcttccatagcttatgttgttgaattttgctgctccatggcggcagcggcagcagctcccgccagctgaccattctgaggcgccatctcctagcattatgctttcttgtagcttcctttggaaa

SEQ ID NO: 9583 - DNA, 931 bp, Zea mays
cactactcttacccctgggggagggctccaaacgcgtccactgttaaaactacttgcagtgagacgaggaaggcaagcgctagcaagttttggctggtgatgataatacccaggcaaaccaatccaaatgaacccaaacaggagttgcattgcatggttccaacttacagcactaccacatggataataactgctcaaactcagaactaagggggtgtttggtttaaagaagcaatctattctagaatttgatggaacgaactcatttctcatattattactaattattagcctacgaggaatgaaatgataaactcatctcattccacaaaccaaacaagaaagtgatgaatgagaaaatgatggactaactcattcttcaaatcaaacaaaccataaatttctaaagacatggtcaaatccagaatggtttggacacatcaccagccttcttctgtcctaaaatactccaacacatctggtccgctcccttatatttctgcatggctccagccataaggcaatgtttctgacgacgcccccaagttgatgttacaattcttcagcacaaaataccatacaggttattgcattgtttataatctacttacaagacaatggtgacatgctagcatcatatccttccctggggatctagctcggggccaagacaaatgaggagaaaaagggctaaactaaagcagtcagccttcaattccaacagagatagtatgtaatcatattccattttaagatagaacacttctgaaaataatccaggactcggaactgatcaacttgaaagttcccagcattcacatagttgcccctgaaaatgaaagaatggaaacctaaccttccaaaggtgaacatgaatccatgtactatgtgacaatcagaaggatcctctagagtcaaccactagcaaaaa

SEQ ID NO: 9584 - DNA, 888 bp, Zea mays
tgctactgcttgctactgctacacacctgcaaatatattcggtggttcatggaatgatgagtgaggggcgcgcagcatggccaccctcgcgttctgtgcagtgtgcagcatggccaccagcgctggcgttcaggttcagttcagtgcagtgcagtgtgcactatgcagcatgaccagctctcgttctagcttagcttcggcatgccaaaaattttcctgaaagactgcatgcatgcatgcatgcatggacagcatggtgaaaagctaactatggcgtactactgtacggtctgaacctgaacttgaactgctttcagacgaaacaacagtactgtccgaacgcaatcatcagcaccggaaaaagcaacagatggttttcgctggatacatgcatgtgtgtctctgtcgagttcgagtgtatatatacagagagttagctcatctaatagtgttaattaatttccagttttccacatgcatccatgcatggattatgtatacttacacatccatgctcagggtcggagagggagctcagctcatcgaccgatcctaattaaccttgtttaataaaaaagatttgcattgcatgcatgcattccttcccctctaaagatacataaaaaaatttcagctttcagctttcagtttcagtttcagccacaacacttgctttgcagttgtaacttaaacggacccatgcatttccatggcatcgacgccaactaagcctatctggcagccctgaccggcttcgcgagccccgacgaggctgtcccgtacgccgcggccgccgccccggcgtctctgaacccgcagaagaactgcctgtgggcgggcaacgtcgccgccgccgccgccggagaggccatgctcccgccactggca

SEQ ID NO: 9585 - DNA, 2167 bp, Zea mays
cccgtgtgaccacaccaagcgacggtgctgtggggggcgcttttataaaggcatgtacaaaccctccggggtatcatatgcggtcaccctgggaccagctgacggccgtctcgacctacggaccctcgggttccgaggaagatgacgagcccaacttttgttgggatttctccgggctccgtaaccccagtgccatgcgggacttcattaccgcatgcgactactgcctctccgattgttctgatggaagccgcagcttcggcgacgaggactgcggcccaagccgtgaatgtttccacgtcgatctagggggtcctggtgaaggcgaccgtcttggtatgccggaaaacggtgatccccctaggcctgcgcctcgcgttgacatccttcgggagctagctgtggtcccagtccttgtggggggtccggacgcacagctcgagcaaatccgcgagatgcaggccaggctcgacgagggagcaggaacacttgagcagttccgccggaacatcgggcaggaatgggcagaccgagctccggccggagaagcgcgtcatctcccacaggacatccagctccgcatcgccgatgacgtcagggcaaggccgccaccggtttccagtggggtcggccagaacctggctgcagcggcaatactcctccgcgcgatgccggaaccatcgaccaccgaaggggcggcgtatccagggagagctcaagaatctcctggaggatgccgcggtccgacgggccaaaagctctgcctcccgaaggtaggggttcccctcggagcatcgcgccgcgacttcccgattcatgcgggaagcctcggtccactccgggcgcacgcgcaacaccgcgcctgcggccccgggccacctcggcaacgagcaccatcgacgcgaccgtcgggcccacctcgacgagagggtgcgccgaggctaccaccccaggcgtgggggacgctacgacagcggggaggatcggagtccctcgcccgaaccacccggtccgcaggccttcagtcgggccatccgacgggcgccattcccgacccggttccgacccccgactactatcacaaagtactcgggggaaacgagaccggaactgtggctcgcggactaccgccttgcctgccaactgggtggaacggacgacgacaacctcatcatccgcaacctccccctgttcctctccgacaccgctcgcgcctggttggagcacctgcctccggggcagatctccaactgggacgacttggtccaagccttcgccggcaatttccagggcacgtatgtgcgccccgggaattcctgggacctccgaagctgccggcagcagccgggagagtctctccgggactacatccggcgattctcgaagcagcgcaccgagctgcccaacatcaccgactcggatgtcatcggcgcgttccttgccggcaccacctgccgcgacctggtgagcaagttgggtcgcaagacccccaccagggcgagcgagctgatggacatcgccaccaagttcgcctctggccaggaggcggtcgaggctatcttccgaaaggacaagcagccccagggccgcccatcggaagatgctcccgaggcgtcaactccgcgcggcgccaagaagaaaggcaagaagaagtcgcaagcgaaacgcgacgccgccgacgcggaccttgtcgccgccgccgagtacaagaaccctcggaagccccccggaggtgcaaacctcttcgacaagatgctcaaggagccgtgcccctatcatcaggggcccgtcaagcacaccctcgaggagtgcgtcatgcttcggcgccacttccacagggccgggccacccgcagagggtggcagggcccgcgacgacgacaagaaggaagatcaccaagcaggagagttccccgaggtccgcgactgcttcatgatctatggagggcatgcggcgaatgcctcggctcggcatcgcaagcaagagcgccgggaggtctgctcggtgaaggtggcggcgccagtctacctagactggtccgacaagcccatcaccttcgaccaagctgaccaccccgaccacgtgccgagcccagggaaatacccgctcgtcgtcgaccccatcatcggcgacgtcaggctcaccaaggtcctgatggacgggggca

SEQ ID NO: 9586 - DNA, 875 bp, Zea mays
gacgacgattgatggctccgcacgtttcctagtacactgatgcacgtgaactctgtaccggtacgtgcggtgggttcgagtgcctgctggatgccatatggcagcaataggccccatgtttacttacagtcacacgacacggctagtctgtcccctgccgtaaaaacggcactcctactactactactactgtactagccgtgtccttctgggatcccatattcccataatcccatcccatttaactgccgccagctcgccgcatgtccttttggatcccatcaaccgtgcgacgccgaccgtgcccaggtttgcctggctataagaccggaggtggatccggactcgcctgcaggggtcgcgtcgcgtctcgcgtgggggaaacgccgccgaaaaccactgggtgcccgctctcgctcggcacgtcctgcgcgcgcccacgcccacgcccacgcccacgactggtcacaagcgctagccagagttcttcacgcgcctcgcgcctgcctgcagccgcaggggaatcgatcgtggcaagggcttgcagtcgcagctactggtagcagagcgatggcggccgcggcgagggtgtcggaggtgaaggccgagggcctcctgcggggcgcctgcacggcgctggccgcggcggccgcgctgctggtggggctcagcacgcagacggagacggtgctgctcgtcaggaagaaggccaccgtcaaggacgtccaggccctctggtaactagtactaacagctttccggatcaccggcgctgctgctgtgtccgtgcgcatcgcatggattctaacctctctgccctgccgcagggtgctggccatggcggccgcggcagcggcgggctaccacctgtagca

SEQ ID NO: 9587 - DNA, 921 bp, Zea mays
tgctaagaagacatgagtggaactaattagatgaaggacaattgaccagtcagtgatcctgtagcgctagcaacactaggctttaccttgcatttgtactgcaaacaaactacgaaatggatcaggatcacatgcaagaagattactactacttgcaaacatgcaacgcgaacatgcaatgcaaagatatatgagaagcagcaattctaaggaatcattccactcgcataaagctgaaattaaccaaattctggaagaagcagagatgaaaggaatgaatctaggagatgaaaggaaggaatcttggagatgaaggagaggttattacaggtcgccaccctggcaacgcgacacctgattcaagctgacccgacccctcctctcctcctctcgtgcagtccaaatccatccacgatcagatttaattcagagagaccatttcccagagaagtgaaataacagaaaaacgcccaaaacttgctgctgcgtttctccccttgccgattccggccgcccgctactccgacggcggcgggggtgcggaactggaggtgctggcctcggcgacggacttgagcttctggaggttgagcctgatgacggtgtcggcgaagaggcgggtgtcgtcctcggtgttgccgtcggggacgtcgacggcgtaggactcgagcacgacggtgcagatcccggggcccgcgagctcggagacggtggtgacggagcggtagttccggaggcggtgctcgcccccggtgatggagaagccgaacaccctggcggcgtcgtcgaggtggtccaggcgctcggtgctggtgctggcggggaggcccgagatgacgcacacctcgcggaggcggccggggcggagggcgtcgccggcgtccgggtccggccggaccgcacagggtaccgagctcgaat

SEQ ID NO: 9588 - DNA, 835 bp, Zea mays
tgataaatgttagcaacctagttagaatcttattatgtgacccctccatgaagaaatttaattactcaacaaataccttaagatattgcctataatgattttaaaaatgtggataacaaagtacatgaaagcagcacacactggataataataatgaaaataaagaccatttcttatcaagagaataaaaaacttgtcatataataattatgaaaataaccagccataacattattattgtttaaatagcacaaaataaaatgtattgttcaagaccatcagacgagatatatggtcgaaaattacgcaaataatcaacagagcagtttaataataatttttgaactggttcaagtgtcgtatccgtgaatctagaatgcttattatggtagtataagtccatatatatatcacgaaagacaatgagaaagcaataatgcctagaccgagctgaaatctttgtatgtatgcatgcaggacgcatgagaccttcctagttcctacccgtctatggtggcagatctactactaatcccaatctccaaacaaaagaattcgaaatatggcaataaccagtatgcatgcacggaaaaaaattgctgcgggtgcccggccgcggccggatcaagcgcgatcgacaagtatgagatgagaaagcatgtaccgtcggcgcgagagaaataattcacgtatccatatcggagagatctgcttgtggcgttgtcacggcaaacacgcacggacgtgacagtgccgatcttgctgaaagcttcgacgaggtgttcttccgccacgtcctcgtgcagatcgcccacgtacagcgcgggtactgcag

SEQ ID NO: 9589 - DNA, 823 bp, Zea mays
accccttcaactactgtttttgacagattgcggcacaagaaagctgcattggaagaatcgtgcaaacaccttcattccaaggttaatggccatcagtctgagagagccatgtttgttgcacggattgagggcatttctcataccatggagaagctatcagagaagaatgtcttcttggaaaaattgttatctgataacaataccgagctggagttgcttagaaggaagctgaatgattcagaggaatctactcatacattccgcaaccagaattctgtacttcgatctgaaaaaaggactcttatgcgcgaggtatgatgcttgaaatctcttgctttctatttactttcatcctagtttgaaaactgtgtaaattgatccctggatactttttatgttgtcaggtggatagcatcaatagtgctctactcagtttggaaacccaatacgcagagttagaagggcgatatttggatcttgagcaagacaaagacaaggccctcaatgaagtgatcaaactacgagaactgttgaggctagaaaaagaaaaacacaaagaagccaccaactctggcatgactcaattcagtgctatacagaagcagataggcctactgctaaaagaagttcaccgcagggaggaccagcttcaagaggaggagcacaaggttgttgaagctcaggttgatatttttatcttacagaggtgcctaggtgacatggctgaagcaaaagctggcgtcttggcacgattgcagaagcaacaagtggtatgcaaggatcaagaggaaaaagttgatttcttgtcacaaaacaaccagca

SEQ ID NO: 9590 - DNA, 911 bp, Zea mays
attcgagctcggtaccctgtggtctcttctcctacccaagagtgccttgagatttcgtttggcccatctatctaccagcatgaacatattttcacattgtgggacttatgatacttgattcatggaagggaagcttcttgatacagaactttcaatttgatgaaacagaccggtagtatttatgggacaaattcccaacttccagaagacaaataaatcacggtgggttgattcacaaagaccttgttgccttgatttattctgaaaaaaaagaaatagcaaatcaatgttatgtcaacatatgttagaaaggggcatgttatgacattgcttttggtcaactttgactacaaatatttcattttttttttctttctgtaactttcacgttaatatattgttgtctctatggcatgaacacataagaagctcatctttgtcttgcgtgttcaatctacaagctctgtgaattactattttgtgtgctacaacctttattctatgttttatatctgaggctgtgatttttctcaatagttcttggcattaccatcatcttctgaagaacctccatatcatgcccacagaatatttcagggtggcgcatggctcttgcagcagaggggaaggtgtattgtttgcaatccagggggcagagggtcctctgctctggcacaattaatttcttgaaggcctgcctggacattttaaatgtgaaagaaagccaccaatagttgatggttgggacgattagtacagcatatacagctttactctgaaatctgagttgcatatttcattaacatgtatttggttgtatctgtgtgtttgcctgtgaggtatataccggaggcgtctccaaattgagtatcctcccatcaagacccacgagacatgtaacttctgcccaa

SEQ ID NO: 9591 - DNA, 848 bp, Zea mays
tgttgctgaaaatgaatcatcaaaacctgtccctgatgaattggatgagacaggagatgctggagataagtacagggaagacaacactgataaatttgggattgttactgacgaagactctcaaactgacaaagatgtcgcagaaaaaataagcaatatgattgaggagtggttaaagactagaccgccacccccaccttcaccagttcaaccatctgctgatagctctggcgtagataaggcaaaaaatggtaccaagttttcctaattatggttacttcattttcccaacaatagcattttctttaatatattttattgcaatcgcagattctgatgataagactgatgctgatgctgataaaagggcagctaatgaaactgagagatctgaaactgcctctcctgataagaggaaggatagagagcatgataaggataaacgggacaaagatcttgaaaggcatgaccgtgaacacgaacgtgaaagagtacggagggatagagagaaggatcataagcatagagaagctgataggctctacagggatcgccttaaggagtgggaatctagggagagagagaaagaatatcagagatatagtgaaaaggagaaagaaaaagatagagaacataaccgcagaagggagatcctgaagcaggaagatgagagcgacgaagaggataataggaaaaggaaacgaaggagtattagctcacttgaagataggaagaggaggaggcaacgtgaaaaggaggaagatttggcagataaaataagggaggaggaggaaattgcagaagcaaggcggcgggctgtagagttgcaacggcaagcagatgaagca

SEQ ID NO: 9592 - DNA, 917 bp, Zea mays
tgggttttcttcctacgatgtagtaacggaggaggccaagaagatgaggcggattgtagccttcagcccagtcgacaggaacattgtccttcgcggcaggcttctggtcccgcagaaaggtcctcagagacgagatgaagaccggcaagaaggaagtgggagtggccctcgcgggaaggaacgccttgaccgtctggaccaccttccagggaagctggttctcaagcagcaggacgtcgtggaggatgtcgctgcggttaggcctcatggaagcgtgcaagctcgggtctattacaacatgggtgctgctctgcatgcgcatgtactgcaccaggaagcaagcatcaataaacatcatgcattggaagtctacagaggtgataccttgtatggcatcctcgtcgtagaggcggcgggcatcgtccgctacggagacgaccgcgctatacatgtcgtgcagccggtatccacattccttgacgtagcatatggccgccatggccttcaccttctccgcctgcttgaggtggggtttgtcgtggtggtaaggcccgatggccacaaaccgcggcacggtatagctttcagagagaccttgaaggcttgcagggtatctatgcatcttctctttcatcaggttgatctcagccttgaactcgctcagcttttgctccaacatctcgctgctgccgctggcatggctgccgtcgtcgtcctcggtggagatgttcgtgttccctcctgtcggctcacgcactccagtaccaacttctctaacaacaagttgctgcccatgccccccgactaccatagatgcagccacaggtgcttcaaggctccagcaggcaccaaacatgtccatgtccgcgtcgatgtcgatggacgcgtactgatccagagggtgagggaggacagca

SEQ ID NO: 9593 - DNA, 894 bp, Zea mays
tactctagagatccctttgtcaactcctcttttttgtcaactctgtggctttcaaggtcatctttaatgtgtgtgaacctgccaagcaatagagatacaaactgctcgagagatgaagagttcatatccatctgttgtgcttgtgccagcaaacatggtaagatacaccagagagcgttccgggcttggttatcatcagagaccagtgcaagaatgtcaaagaggccctccatgaagggtaaatctgaatgcataacgagagcagagtgtgataatagagctaatataaacattgttttaaattgtaagatgcattgttcataaatgtgacccaccatgagagagcctaggcacaatatgctttccatctgccaaaatatttgctaatacgataaccacagaagcacaataggttgtaacctgaagcagaattagtatataatcagtgggagcctgggacctccttttccttttaaaaaaactgaatcagagtttgtaaatttcacgcaattaacatattttgtcgcttattaaatatatagaactttaggtatctcacagagtataaaatatccaagaagcaagaaaactagtgatagtggaaaaaagagaacttcgtatttatgaacaatacatgttggcatcttggtgggtcatgcagtcatgttgcgtttcatctctagtctacctaaacttgcttgggactaaaagactttgctgttatcgtatacaagttaggttcttacattgaaataatgcaattaccaaagatgcaagacgcaagagcatcaaaccagactgtacaggatgaacaataaatggtgaaagaaatgaaatgggagctcacctcaaatttatcaggtaacttaactatgctttcaagcacttgaatca

SEQ ID NO: 9594 - DNA, 875 bp, Zea mays
tgccgggcgtttgaccctccggcgttctcttctctggactggacctattgattgttttttttttgtgcgtggcgggggcgtggcggtgagtgggcgactggcggtacgtacgaggggcagatcgggcagaaaaagcgggaggagcggagaattccccgtccgttgcgtcgtccgtatgcttgtgccctgacgatggctcggctcgttcacgtcaacagcgtgagccttttgtacatgtttgtttgttttgtctcgcccgccgcgcgcggactctctctttccactctacaccctactacatgcgagcactgctctggctcctgctgtgattggtgttgcagaaggcaccctggagaaacgatttgatcgtactacgacgcccggtccgtacgtagtaacaacgatgtatgtatcaccagtggcgcgacctgtctagtcgctatctttttttgttgagaggcagatggaagaacgaacccatatgtccatatcatgcgtcgtcatgtgacgcgcccgcggcggagaccaaataaagcgaggacgcgagccaaaggcaagaaactgccgaggcccgtccgcgcgcctcgccccgaactgaaggaacgagccatcgcgtcgagaacaaggtccatgcatgggcccagagagagagagagagatagcgaaagggcattccttttcttatccccccctggtgggatctgggcaaggcactggcgtcccttccgcggcgaccttgggaccgttccgaacgcttagcttggcctaagcttgtggcctttgtttgggggggcaatttgcaccagtgggctaggttaccgtttccatcttacatacgctaccgctctattgccaatgtccccaacaggctttgt

SEQ ID NO: 9595 - DNA, 890 bp, Zea mays
tgagagacagagtttgacgcatgcccagggccatcaaccttaaatacaggattacttgtgaaagatgcaacttgtccagaattcttggaaggcactcgttgattatctccatttaacttgctttctaatttctgtgtaactggtcctcccaaaactgattttgaaatcctggaaagaaaaagacatcaatattagaatctaatgtacttcattttatgcttaaaaagattacaaaatagagtggcaaacaaaaacagcatggtccagccaaatagctccgactaataaacagattaaccaaatgtggtcattcatgttccaacaaatgacaggttgtgttattggcacttttaagtatcagcaaaattgaagtactattcagtgccagaaaaagtttgatctgtatttcattatcaatcaggaactaacctagggtcactttgtgcagaagtgactgaagcactgcagaatactgaaggctgcttttcaactgttagtataggagatgtcaatgtaggtgttggagggccctgtgagtaggcattgttgacagtcggggcagggaaggtgaagccatttcctggagtggacattttgcttcgtccaatttcatcagataataccagattgggagcattacctctggaagaaaaggctggaggcttttccttgttcaaggtaatttgtgagattgatttgttcgatgcaataccatcaggtacttctgatggagaaggttccaaaagatctctctctgcttgtactttcttttgtcgagaaacatcttcctcgaaatatatggcactctcatgtttctgctttgtttctgatgtgttttccttctgtgaaggtactaatgtgtcaagctgcttcagtatcttagttgccat

SEQ ID NO: 9596 - DNA, 963 bp, Zea mays
tgtccattaagtccggtttcagacctttcaagcaaaaagctacaatatttcgtccagaccttctcccacgaatcaaggacgaaattcaccggcttctagaagctaattttattagaccttgcagatacgcagaatgggtctccaatattgtgccggtggagaaggagtcaggtaagcttagagtatgcattgatttttgcaatttaaatagagcaactcctaaagatgagtatcccatgcccatagccgacacattaatcaataatgcatcaggaaatagaatcattagctttcttgatggtaatgccggatataatcagattttcatggccgaagaagatgcgtctaaaacggcctttatatgtccaggcttcattggcttatttgagtgggttgtcatgacatttggtcttaaaaatgctggtgctacttattagagggctatgaatttgatcttccatgaattgttaggaaacattgtggaagtatacattgatgatattgtagtcaaatcggctgagtttagttctcatatagctgatttgcgcaaagcctttgataaaatacgtcggtatggtttgaaaatgaacccacataaatgtgcttttggggtgtcggctggtaagtttttaggatttgtcatccatgaacatggtatagagatagaccctgaccgaatcaagtctattcgaaatgtgggacctccgacctgtaaggtcgaagtgcagaaatttctcggcaaggtgaattatttacgaaagtttatttctaacctagccgggaagattgatgccttcacccctatccttcgacttaagaatgatgctgaattcgcttggggggcagagcagcaggaagcatttgatctcattaaaaaatacttgtcttcagctcccgtattaaaagcaccacgagcaggagtaccattccgattatacattgcagggggatcctctagagtcg

SEQ ID NO: 9597 - DNA, 953 bp, Zea mays
tgccgcggcgcggcggagacggcggcaacgcccgaaggcggtgaagaacacggaggaggtggagagccagcggcgcaaccacattgccgtggagcgcaaccggcggcggcagatgaacgagtacctctccgtgctccgctccgccttgccgccctcctacccgcagcgggtacgtacgcacgcacacgatctcctccatggctggcgctccccggcagtatcctagccgcaagagctttgcaggtcatgtcaccaatggtccaatgtcatgcatgtgcacgaacggcttggcattccaccgtgttgctgattgccgctgccggccccgcccagcttttactgtaacggatgtcaaatcttgctgcccccctccctctggcccctggccatccgctggagctgcctcgccgcgctttggtggcacatgtcacggaatctctagggatcgtgtgtactgcactgcaggcatcatcatcgttcatcaaaagccgcgcaccttcttgagcgccgagcccttggtcgcgaccgaccgaatggcatgttccctttgcaacgtgcgtgctccctacagtctcctacgcgaccgatcgagcgctgatgtggttggttggtgcagggtgaccaggcgtcgatcgtggccggtgccatcaacttcgtcaaggagctggagcacctgctgcagtcgctggaggcgcagaagcggcggcgccaggggtgcaccgagccaccggcgccggcgccgttcgccggcttgttcacgttccctcagtactccaccgccgcgacgggtgtcgtcgctggctctggtgacggtgctggctccggcggcggcgcctgcgcggcgggggcgcggcggggcgtggccgacatcgaggtggccgtggcggagagccacgcgagcgtgaaggtggtcacgccgcggcggcccaggcagggtaccgagctcgaactcg

SEQ ID NO: 9598 - DNA, 909 bp, Zea mays
acagagcgattcaacctcaaactgcgtaggtttggagacttagcgacaagtctctccaatgcaccagaattcacttcccctttgatgcaagcgaaattcaaggaaaccaatgaggtgcaggaatcagggaaggaaagccatctgggcccacggtcctccacgtcattttcctgcaaatctaactccctcaggagcctagataacagataaaaggaagagaacaaagtcaacaaattaactataaaataccatgtaacaagaaaaatttgatgcattcagttaaaagcatccaacaactgctgaatactaatgataatgatttgttaaacaactgcaagagaatttgcatctagtcctagaaaacaatcacaagcagtacaaccacaactagttaattatatgcaatatggccaaaactgtatggattcatcacactgaataaaaaatatagatgtcatgcagaaaaaaagtgctaaaatatctaaagagcaagcaagaacagacaatcaaacggcacttgaattgaaaggttcatcacaggtccagctcattaagggaacatgagcagaacaatgcaagacttgaacagctataaaatgaaggataaaatatggaagataagctaaaaaactaacaagcaatggcacctaagtgataagcatcagaagaaataaaagaaagaacaaaagtatgctgttctggatcccaatatcaaaaggcaattgcataaaacactggtaaggaagtaaaatgtgacgctattaaggaaccaaaatcttcaaggcaattgtcatttgcaatagctgcttatatcaaaaggtaattgcatacaacacagccaaggaaataaaatttgattattttttagaaaaaagtgtaaagtttgatgctctcagggggatccttaga

SEQ ID NO: 9599 - DNA, 1276 bp, Zea mays
gcttgataatcgatgcacatcatcgtagtgccatctttcttctccacgaacaggacaggggcggcccaaggcgaggtgcttggcctaatataacctttctctgacagctcatctatttgcttcttgagttcaaccaactctggtccagataccctgtaggctcttttagaaatgggggcggttccaggaagaagctctatggcaaactcaactttccactcaggtggcatacctggtaaatcgttcgggagcacgtccagaaattctaacaccactttcataatctcgagtggatctgcctcactgctatcaatagccatctgataacaacttcctttccttggctcgggtgggactaactcggtcaccacctcccctcctagtggggacatcaacttaattgtcctcttatcacaactgataactgtctgatacttatctagccaattcatccctaggatgacatctattccctgagtacccattactatgaggttagcgggaaacgctatcccccttatttccacacttacattcaagcaaacactatcggctcgaactttaccaccggctgagtcaatttggatgggggttgacatggtagtgattggaaggttatgtgcttctacccatgatgcagtaataaatgaatgtgttgctccagtatcaaataacacttctgcaatatgggagtcgactggaaacatacctactatcatgccggggttttcctggactgcttcagcctccaagtgattcagtctcccatggttatagcgtggctgagagtggttgcctgctcctggctgagacacattctgctttgttggggcaatggggcctgactgctgctgggctgccttcttcggacattgcatcacccaatggccttgctctccacagtggaaacatgctctgcttccgccttgaactggtgctacttgactgctctagttgggttgctggggcgggaagacgaggtgactgctgattctacatctggaactgacctcctcctgactggttgttctggcgattctgctactggtgttgagggtactgcctttgaaactgctgctgctgaggtgggcgctggctctgcctgaactgttgaggtgggttgcctgagaaacgagggtgattgctgcttccaggctgaggtccactgatcttatgcttgtgatcctccatctctaaaagcacaatatctgtcatgattgctctgtcagtcaggtgctggaatgtggggaaggtatgattcatcagaggatcctca

SEQ ID NO: 9600 - DNA, 858 bp, Zea mays
tgagctaggatccgatgcagcagcctctgtctgcaagaaattgggattctgtgatgatcatggcaatatcattctggaagatgctagcaaatatgctgtcttattcaattcaccactctccagggagcacatcgctgccttggctgcgctgttcggatgggatacatctgagctcgcataagcttgggtctattcgtttggtcgtgtttttctttctcaatggaccagtgcaacttcctaatttggaatgtgagaggattgaacagtagggctaggaaagataatgtcaagaccctagtcctggacatcatgccatcacttgtctgtttgcaagaaaccaaaatgagcaccatctctgattttgatattttgtcaattcttggtactggttatagtaattttgttttcagcccagctcaggggacaagagggggcattttagtggcttggagagatggagttttcacccacagcagtcatgtaattagagagtactcggtctctattcaactgcagatggcttcaggcccactttggtggttcacaggggtttacgggccacaccaagataatcttaaacaggcttttctacaagagttaagtgaagtcagggcaggttgtgatggaccatggatattggcaggtgattttaatcagatatgcaggtctgaggacaagaacaacccttgtatcaacagggccctgttgagaagattcagaaggtggatagaggattgggagctgaaggaaattcctttgatagggaggagatacacttggtccaaccaaagacaggctcccactcttgttaaattagaccacgtattctgtacctcgagttgggaagagatgtttcca

SEQ ID NO: 9601 - DNA, 852 bp, Zea mays
tgctagctaaattaaagctcgggcggccaacgcatacgcaagtcagcgcgccacgcatcatgcatgcagctagtactacttttttttctcaaaagaaaataaaaaagcttaattaacgacgtcgacgacaaattaaactacatcatatatatatatatgcttacatactgtagtaggagtagaagaaacaaattaacaactaatacacgagtcatgcatccagcatcatatcagtttacttgacagttccaattccatcgatctctgcttgcttgagttcttccgtcacgcgtaataatatgcacgtatatatgtatcacgagaaaagcgtctcacgggatacgcgccatatttctagcttattttaaattcaggtatttaactaattatatatatatatatatatatataatcacaaataactaacgagaaaggtgtatccagagcaagaaagtggctggtcgacgacgtcatccaagttcaaagtccaaataataaactagcagcgtagtgcagagaaactagacttttcgacaaaattccatggttttgactccattcccatcgatcccttgacttggctgtccgctcgtccatccctagccttccatctgttaattacatgtacacatgacagggacattaatattttaatttactagctattaacagatattaatcctctccgatccgttcttaaattacgtacaacacgttctagtttaatttttctaaataaccgttttatgtgttcgttgcagtcgtttctgcgcggcggcggcttgaggcagcatcaatggcctcctcaccacgtcccttcacccgcagccgacctcgtgcccatacccttca

SEQ ID NO: 9602 - DNA, 934 bp, Zea mays
tggaggtttagttctcctctccaaattaaatagtgggttccgggttttgctaggttgagcatgtgtcaatcgtgagcggtgaaaggacggcagcatgactagctagctagggggatgtgatgcatgtggattatttaattaacaataataatgcacaaagaatatggaatgtgaccttgccgttcgtattaggatattggtgagagggcttaagtgtgacaggccttagctgatcaaaagattccatctattcatgctttaatcgagtagtagtgtactggaaatcatcaccggacggctcctccactttctagtatatgcttatggattgtactttcttctttgtctctattagcttgatgctctttttcccttagttgctatcctagatgctgcctagtcctgaaattaatgcgacacgggcatctagccatcactacggacagttctgagacacgcggaaaattaatgttcaaaataatacaagcatatatatatataactactcaaacaaaactttctactactggtggtttcccataaagaaaagaaaattatgaaatgagagtgagtcgaaggtatctcatgtagcatgcatgcttgttaagttttccaccaaatgacccccacccggcccactagtatacgtagtgaccaacacgccctagtcatcgtttatttatttatttatttgacgcaatgatctagctagtgcaacaagttgcatggcaatatatatgctgtgtcatgctatcgttgagcttacctcagagctcactcagatctgaagctagcaaaaactatgtctctatatgatgtagagatgcatggtctgcgtattttgtttcacacatcatcaggcggcggacaagattagataaaagagtaggctagctactagataggttagatttatacactaacactactagca

SEQ ID NO: 9603 - DNA, 520 bp, Zea mays
ctgccgctctgcagtttctagccatattatttcttattcttggtctagaaagcgacaaagggacacaattctaacagtctgaaggggatgttacggatgaaatgaatgaggaccatgatgatgaatctggatctgctgaagttgctgatgcaggctttcatttaaatgatgatttaatttaaattattggaagcttcaagccagctgattggtggatttttggtcctgctttttgcctaaatcctttggggcaattatttatataccctatataagtataaccactagtctaaaaggtctaggacgaccaaggaccgactaggggtcgactagtcaccctggtcgtcgcctaatcgcgattagtcgcctggtcggtcccatggatcgaccaggcgacctgcaatcattggccagtgttgttagaggcggagaggctgtggaggtggtcgacattgtggtgaggaggaagattgtccatgagagaagaggtaggccgattggttggagaaaagccatgaga

SEQ ID NO: 9604 - DNA, 774 bp, Zea mays
cccgctgatcctctagacccgacctgcaggtgtccgatcgaagccctatacattttcctgcctccaaattatcattattcatgaatcctccaaggagtgtgagatgcattaattcctggatgtattctgctgatactcacaggacattgcagttgtccccctgttggtcatactccctgtgctggagagtcaggtatgcaaaaggttagcacttatttatatcaaactacagaaggttcatctgcaaaatatgcacctcatatactttcccattatgctacaatgcaacctaaggactgtcacattgtgttgaaggatatgtgtatttctaagaccgtttttgtagttgataatattttgcatgttaagttactaagtataaaaaaagttgtcattgcaaacatacagatagtcactaacatattactggatcctacttgtttagctactgcacacgttcctaagcatgagcatgtttgccttcacattacattgagtcatacaataacatttattggctttattacagaatattatagagcaaagtgtgtggccaattttactagctgagagcttaaaggcactgggcgggcttggcttactttcccttggggggaaatacttcataagacgtgtctttgaggtatgttacccttctacattctgaaatacatgctcatattttgttcaataaactttttggtttggtatacaataaaacattgaattatcattcttccagtttgttgcagagtcaaggagttcagaggcatt

SEQ ID NO: 9605 - DNA, 781 bp, Zea mays
gcttgcatgcctgcagttgcagaactgcacggatgtgtacgagactgggctctctccacatcgtcgatttaagttgtaaaggcagtatctcttggctcgcttagtaattttagttgggttgaaagaattgtaaattaaaacaattttggtagttgattttaatgtcgtatttcttaatcccatcagcatgggaaattttgtgttcaaaaaaagaagagaaaaagcagcttggttatcttgtgtcgtgtgccttttctcgatgtgtacttattcttcgtatgtatggggatagtaacgcatttgcctagtgatatttaactttatagattaactgtctgaagaagaggaaagggaagtgtataagtgtaaaacggcaggttccagaaaattggctagtcatggcttttcgagcggaatgcaagagtagatgaattcactttgttctaaattatgttcattttaaatgaaatttatagaaagtgcgccagtgtatataaaatcatatcagttttattagttttttttttcatgtaatatgttttgacaggtcatttatcttaattggaaaaaagttgagtttattttccccgaagtgaaccccgaccttgaaaagggaaattacttttggagtattattttggcctttatttttttaacatattatcaatagtttcccaagtcttttatgtatataggtctaatttaaaaactttgccgattcctggaaagggtagaaggtccgatgcaaaagttccaactttgcaatgcttcgacctagatg

SEQ ID NO: 9606 - DNA, 802 bp, Zea mays
cggtacagcatagttcaacttcatgcttgtccatggcccttcttttgaagggctaatctgaatatatccagtcttgctttcaggactggctctgttcccttgttgtacactagctctaccagaaacaagtaccgcaaatcttatttttccactaggtttaacagtttcctgttcctgcaaagaattgtcaatataactttataaaatattgtaagtatatttctttagaagcacactttgtgtggactctattttgcaaaagtgactcaatacatgattctccaaatgtcagagttctcaccactgtcttagttgacataaggtctcctaaagccaaatcaaatttgacagagtccggattagaggtaggagggagcttttgcacaacttgctccaatggagcagagtatataccaactggttgacctgttctcaacataaactataaactagagttgggaaaaaacaaaaaaaaaggcatttgttgtgaactaaaatcacgaacctttaccagcatcaagcacaagaagctctagagtatagctgtcctgaaacattgcagtgaaaatgaaatgttacttaaattgaagcctgccttcttggaaaaatcaccattaataaccgtaggagaacaatttccatggattatctaaaccaaaagagaggtaaaagggtttccagaatgtttttggcgtttaccatacccaaacgtttcgacttttgaaaaaaaaacattttgttttccagttaaccttttctggtgtttctgtgacaaagtgtttcttccaatagcagcacaagg

SEQ ID NO: 9607 - DNA, 749 bp, Zea mays
gctaggcagctacaactatatatatattcatatatatattgatacacacacacatatggtcctgttataggtggacgactataggacgactaggactcaactaggctcgactaatcgagcaaatcgacaactaatcgtgattagtcaccttatcggtgctcaggcgactagagtcgactatttgactttaaaaccttgctcacacgataaccttttgtatcacatgcatataggatttacaattattgacttcacacaagcaacactacaatggttcccaactttatcataagcaactgaaacaacacaacataacaatcaaatgcaagaatgaactcacactgttagcaagatgcaatgggcagaacattttaacgcacggtggcggcttcgttttggtttggccccaacctcatgggggaaggatttctcctatattccagcctaccaaaggcttaattgctggaccatcatgtagcagagaagtgctagtcattagtcaggtataaaaacacaaaaggcttgttatctactgactgttgatgaccagaagctaggttacctcccaccgacaatgatttgatggggacaaacagagctaatgtcacaagacttcagtgccaatggatgtttgggtaaatcgggctaaagacttctttgcttccgcaccgtagaatcaaagcttgccaaaaaatgtggttgtggcaagaaaaataaaaatcaaaaaccacggtcccataaactaggat

SEQ ID NO: 9608 - DNA, 762 bp, Zea mays
atgacttgctgttctgcagaggacttcatgggtggtgctgaaattattgtttccccacccgtcgtctccttccgtgaaacggttcttgagaagttctgccttactgtcatgagcaagtctcccaacaagcacaaccgtctgtacatggaagcgcgccccttggaggagggtctcgctgaggccatcgatgacggccgtattggcccacgtgatgatccgaaggtgcgctcccagatcctctctcaggagtttgggtgggacaaggacctggccaagaagatttggtgttttggacctgagaccactggcccgaacatggttgtcgatatgtgtaagggagtgcagtatctcaatgaaatcaaggattctgttgtggccggtttccagtgggcatcaaaggagggtgcactggctgaggagaacatgcgtggaatttgctttgaggtatgtgatgtcgttcttcatgctgatgctatccacaggggtggtggacaggtcattcccactgccaggagggtcatctatgcttctcagctcacggccaagccaaggctgctggagccagtgtacctggtggagatccaagccccagaaaatgcactcggtggtatctacggtgttctgaaccagaagagaagtcatgtcttttaggagatgcagaggccgggcaccccgctctacaacatcaaggcttaccctccctgtcatcgagtccctttgggttctccaccccactggggggctgcaaccctcttgttcagg

SEQ ID NO: 9609 - DNA, 845 bp, Zea mays
tcggtacccggcttatcctgctagaccgacctgcagctccgggctgggcatgcacggtattgcgcgccgagtacttgcaaggtaagcaaacgccgagtacttgccttttggtcaagaagggttctaatcatggagtgcgagtactgcgtgagtgagcaaagtttgcttccacaagtccacatacatgtcatacgtggcgtgactttggcaggaactaaagtatgttatcctagtgtaccccggcctttccatgcaaatggaagttggaagggtcaatcacgacatggagtgcgggaaaaaaagtggggggatttcctaacactatcgctggccgggagtccgggaccagcggtccacgcgcatggtagcggccgagaggagaaaaggagatcgatggcagtatgatatgggcggcaggagcaaagcaaccagagtcgtctcgtcccgatcaggagcaaagcataggcatttcatggtactttgacaaacaacccggggtgacctaaaccatccaagccgtcacatcacatctaaagcaacgaaaacttggaacttcccgctccggaaccaataccagaacataaaaacatggtgctttgcttccttatttgcgaacaagactagcgctagctgaactcatcatcgattgctaattttggggtaaatagcacaaaatgttggcctatttaaaatctatcttaaattctaccgctacacttatatggagtcatacatattgccctagcttaatcattcggtaccataaaaccaattaggtggctgcaaaaaaatggacttacccaccttttaccattgggaaaaagggcaaaggaaaaaccaaaccc

SEQ ID NO: 9610 - DNA, 821 bp, Zea mays
catgcctgcaggttgccgtctacgagctcatcgacgtccttgtccggcagctgcgcatgcgtcgtcgtcaccttgctcttgccggtgagcacctggagcacgatgaccccgaacgcgtacacgtcgctcttctccgagaagcggcccacggtggtgtactccggcgccaggtaccccatggcggcgctggctttgagcgtcgagaagacgaggtcgtccacgaggagcttgtgcaggccgcacccggagatgaggggcctgtacgcgtagtccagcaggaccttgtccgctgagatgttttggtggacgagggccggcttgttcgttcttgtgctgtgcagatactcaattcctggaacacacacacacaccaaaaaaaaaagatgcacgatttagccggttgcgcaggagctaaaaattaccggtatctcacagcgcactgatagaaacggttactctgatagaagtagcaccaaaaggttttttgagacatgtcatgcagaggagctttttcagtgcatacagtgttcagacttcagaatgtgaatattgctgcgtccctgcctgctgcacagtcacagggttttcgcacacccatgtgagcgaccagcgcaacacggatgaatcgatgtactattcctccagtgattgagtgaatcaatgtgccaaatgcttgcatgcgcataccatgtgaacaagtatgcacagtaccgtgtgaaatcccgggggaaaaatgtgggccttcagccaaaccccctagtgggggatcagtagtgacactcactgctaaccaactgatagcaagagagtgacaagatgtg

SEQ ID NO: 9611 - DNA, 797 bp, Zea mays
agctccgcatgcctcgcagcagtttctcactaaacagtgatcggttttgttgcagcaaggcagcaaccgctcttgcaattcttttttgctgtctcgcaatatttttaattgttaaagcgaagttgcgtggtaaaagcgtgtctgggtctattttcgaatatttgtggtccgctagttcaattttaactaaaacacgacaaatagaaaagaacggagagagtacaaaataacaagacaaccattctcatcctccgttccaaagtacatcattctcatcctctgttccaaataacatgtctctttggtgaccgtatcatatcaactgtctaagatagttgctataatgcctattaatttcgatacaatcatcacttgtaaagagatatcttttgagagagagagagattttgaagatgtgtctatttaaatagccacatgtttcgcaacactctctcctaatcaggtggcggatataggcctagggccaaccagttcgtggtctgaggcatgatctttatatctctacttatgtttgttgtcttttaatcaaaatacattgatcacatcggatatttttttatgacttttcattcctcgaattttgttaccgcttatatattctgtttaagaggattaggccccgttcgttttattccgagattatataatctggcttgtagattatataattatatagtgacatatttatggcttatcgtagtctaggtttctattttatatagcccaactaaataatatgggttgtttgtttgcctcttaacttatttaatatgaat

SEQ ID NO: 9612 - DNA, 792 bp, Zea mays
gctgcggtgcgtgcgcaccagaaaacgcatggcccgccgcccgccggggccgctccgtggctccacagggtggagactggagaatcgagatcgagcagtggagcttatgtgtatgactgtttagttgatctataagggcatgtataatctagagtttatgaaaaataaaaactattcgaatctgaattcgaatcagtatccatatccaacttttatatttatcttttgaagaggattaggaccaacttgaagtcaatttttatgaatctaaaaataagaatatagatttgcatagccggctttatatcttatttattcacaatcaagaaacgaaggcaaaattttcataccctgaataaattattggatctataacttttttttgttttgttgaagagctagattctataagtctaatgctgacagaagagcagcagctggatagctagttggatagaactgcttttttctctctggggcgtctctatcggcgaaacgatcctcagctcagctgggaggatgagaaccaagaacggcatatcctgcgagatattatctcgattggtagcactatggggcacatcgccaacttgtgcagatgagggaaaagcttttgccacactggatagcagatagctattctcgatatctggattcacgattgaaccaggctaacggggaaaggggtactcctggccttttttttttgggcacacaaggaacgcttcgataaggtacaatgcctggtttttagacaaaagtgttactaggatacagtgatcaggctgagag

SEQ ID NO: 9613 - DNA, 874 bp, Zea mays
atactatagtgacttcactcgttcttgcaacggaagcagcaaaggtctggcactagtttttagtatgatcattatgacatgtttttcacctgggtgtttctgatttccttttcatctgtataggttatttgtgcaatcattttaatgagatggcaaagggaagcctgaaaaaccagttaagaattggaaccctaactgaatcactgactgcgtcttttactgcctgctgctatctatgcccttcagaatagtctgctgcaagtatcattcaagaatctggattccttgaccttttcaatccttaaccagactaagcttttgtggacatcatttttcacatttcttattttggggtatgtccctatttgcatttcaatttctaaaaaatactcaggttgaagatcatctgaagaagtaactaccaaaacatgcatgcaagcattatagttcgaacttccttagtattgaatacttgcagagtcatttgatcctgtcgacgccgtgcctgagaccagaagatgttcacctaatgaaaagtggcagttcttaaaacttgtctggtgctctaaagtttaactgcaaaatgttgattatctggaagtccatatgcaaactatacatattaagtctctgtttgggatagctctagctcgaggaaatttggtgtagttgggtggagcaagtcattagttgctctaaaaaatcgtggagcttgagttgtaagcctttagaagacatttagataaaccattttggttattatttagataaaatcatttttaaactatttaaattgttttaataactcagctcacactggagcattccaacacccctaatagtacagcttatatcatgagctatcgtcatgctt

SEQ ID NO: 9614 - DNA, 803 bp, Zea mays
cacatcaaaggaaagatgtttcagatgtggcaagccattaatgaactaatcataagcaagaatgcagccacggatgtggaggtctccagtcaaggttcaacggcattagttctgctccacgtgctaggctctaaaaaaggacaatccaaacagtaaaaagaggaaagagatggagcagcacgtattttttcccagtgatttgagacacaaacaacccattacaaccaatatgtcaagctttgtcaaatgctcaaacaccttttatagatggaagtgtagttaatgccatattatgtcccaatagtaaagttctcagtgaagtgaggccaccaaggcaaatagctaaagcttcatctgtaatactgcatgaagaaagagaaagttcacagagtcctgacggtagaaccaatggcatctccatggtccttccataaatgaatcttatcctctgctcatggcaaaagagccatgccttgatgatgttttctttcatccatactttatcttctctttcctccagaccactttcaataatttgaagatgctttgatatttcatcatccatcatcaatgtcatcaactgcttcagaaatgaatagtctttccacagtacattcctaacttcttctcctgaatccacctcccacatcaatgcaagtttagatgccaggtcgtctgccttgattattaatattttcctttaagttaatgctggcctagctcattgttggtggataacataagcagtgggcaccaatcaattgataaatctgtaaggcctgctggaagattagatagttcct

SEQ ID NO: 9615 - DNA, 815 bp, Zea mays
tcggtacccgttgatcctctaaacccgacctgcagcaaaccataagattacatctcacattccatcaatatgcgcagcagcaacagtcaatgatgcagaaatgaacagagtatgcagaatgtagcacctgccaccaagggctacagccatttggttctcaagatagctcctgctgtacaatccagattctagcctttcttcgcttggagcaaagaatgtgagtccaccagcctggccacgagggatgatggaaatcttggctactggatcatactctggcatgagggcgccgacaagggcatggccagcctctacaaattccaaagttcaacaacagattaggaacctgagccccgtaagcgggagtcaaacttatggttataatataaatttgacaacatttaccatggtaagcgacgagcctcttcttctcctcggaaacaacagcatttttcttctcagggccagcaatgattctctcaagagcatcagagatctcatccttgctaatttccttaagatcacggcgagcagcaaggatggcagcctcattcatgaggttttggaggtcagcaccagtgaaaccaggggtccttctagcaattttatcaaaatcaacatctttcgccaaagcctttcctcgggagtggacctatttgataaaaaaagacttgtaagctcatgtatacatacatttaaaatgaaatcaggatactgggaaaaatcaaacttcttttttaaataatattgtgcatgctagtatagcttgtacctacaaaggcttgcatgagtagatggagacatattaagggcat

SEQ ID NO: 9616 - DNA, 708 bp, Zea mays
tcccctccaaagcagactctctaaagatgtatttatagaggcggttccatttacatatgtctccataaatatatctttaggacatctacattggtgtttaatatagaggttcttaaagtgtttaaaggggtatttacaaaaaaaattgtggagtcatttcttcgtgaagaatcgtttaacagacgccttcacttcccttgtacgaatacgtcttctattacatcgatctgatgttctacatgtacattcacttctgcatttattaatagactacatttatatactatctattgtataatagagttttttagttgtcttttatgtttgaagagtcattttggtgtctctctactatacatgctcttataggcggttgttgtggtatctcaacacttgacgctagtgtccaaggatatttttacccagacgcatgggtgacagtttagcgttagaatcgactgtcattagtgcttgaggtctattatatggtttttcctttttatgttgtgtgtatcctgatatgcaaaggccgaaagtgttttcaagactaaatcatctctatgtatggacttgaacatttaaaaaagagcttcattttatcgaaaaaggcatcatgggttatccaaacgtttttttttaagttccagtggtttgattagtatgttctctcttttctatggcgtttgaggcattataggtggatttaat

SEQ ID NO: 9617 - DNA, 489 bp, Zea mays
ccctggagccgcccccagatgatcttcccatgtgctaatgctgactcagatgcaactgcgccgaggaatcgaaagcatgttcacgcttccagcttgttttgaagttttcccctgtaaatctatgtaattttcaatgacattcagcatattattagagaataaattatttctttttgtgtatgatcaattactgaaacaaccaatctgagatgtgcaacagcaaatttaaacactgttctttaagacagattcaagactgatgaacgcaagcatgacgtacaagaaaattcagaaccattattcaatacctatgaaggacaatctttgatggagggattgcaactaatataacccattgctagcaaaaagtgggtctgacaatgttattcctaactacttggttttatatcctcttcatactgagccgacagaggattcgttttgcatttggagccgagcctataatatttgtgttcaaccattgcatct

SEQ ID NO: 9618 - DNA, 629 bp, Zea mays
gcgtgcccgcagcattacaaatgtcatcattttaaaatagttggattagaaaacaaaaataggataatgcatttaaacaagcccttaaatttaaaaaaaaacggccggggagggaaagaccgccctcccggtattatattaagaagaaaccaaaacatggtcccagacgagaaactctccaaaacctgacccccatcactagcgggccatcaccgctcactctacaacggcccaaccagagggtgtcacgcatgacttaacccgagagcggatggtgcacaacaaggggatttttttaaccaagccaaaatacacccacgatgggatcgaacccagcacctaaaagtgctactctgaagccggaaccattactctagaggccctcgtcccttaaatatacaatctcgaggctacacctcaacgcccctctacttgatccatcctattaggcattgaggatatgaactacatgactcgcctaaacattaactcattcattgatgcacacactgaagaaggctttcaccctgactttgtcataaataaaataaccacacactgggaaaccacaattgaacgatgtcaaggaaggcaacctgattctatgtaccattttgacaggagacccg

SEQ ID NO: 9619 - DNA, 765 bp, Zea mays
acctgcagcaggccaccagaagagcgcgccgtcatcagctagctgcctcctcctcgtcgtcgtctcggccaccggcggtggtatgggcggcgtgctcggcgcgctgctgcaccggcggtccgggggcaggccgccaccggcgcgggccacgaggcgccgggcgctcacccgccagccgtcggcctatgacgccggcggcgggcacccggagggcgatgctgtccaatgtatgtactcgggcataccggacacctacacgtcgcttgacgaggtgcctggccggggccaccgatgcatggtttgcaagttgcagcccgacaaagcaagcaagctagctagcagagcagctcgatgactgtcggcgcggcgtggtgtctgcatgcatgcaggtggcggcggcgctgcgcgagcaggggctggagtcgtcgaacctcatcctgggcatagacttcaccaagagcaacgagtggacagggaggcagtcgttcggcgggcagagcctgcacagggtcggcgacacgcccaacccctacgagcaggccatcagcatcatcggcaagacgctgggctccttcgacgaggacaacctcatcccctgcttcggcttcggagacggtgactgacgactgacgacggccttcctctcctcctgttgatgcatccatccatcttctcgtgtgtccttctccttaatctaacctctcttcttgcattggttgcgtcgactcgcgcctgcactgcgcaagcaccacccatgactacaac

SEQ ID NO: 9620 - DNA, 506 bp, Zea mays
tgcgacgaatacgaggatggggaagtaagcgacgaggaggaggtggttgtgaagcacagcggcgacggcgaggagatgcggtgggagtccatgttccaggatctcaagcccaactagccgagacgcgcgcgctcgcgtgccaaatgcgccctgcactgcacctgtgacctgccggccggtgcgtacagcgagcgaagacaacgtgcccgattgccagtggagtggtcagtactcactagctacctacctctctacctgctgcctgttactgtaattgcaatttgcaaccgtgtaaatgagtgtgaaaaataatgcccatgtgtcattctctgaaattttgagctgggagccgatccaggttcgtgatgataaaaaaaaatacctgcgacattttcgttcctgctgtgaaatattttaagggcgcgtctgtcgttagtgtagatccctgacaaagggttggaatagatagagggccgtgtccccaaccgagacaaatcgaagggtgg

SEQ ID NO: 9621 - DNA, 425 bp, Zea mays
acctgcaggtccgtccgccacacctttcctgctctcctctcttctgccactcgcaattcaagatttcctcattttgctgagaaaataattgaaaaattccctcattttgaggtaatctgttgttgcgtcgctgttcatgcttgtcacgtcgttctgaaacattcagcagctcatatataatataacctgatttcctaatgtgatgctcaggacagataattctgaacacgccaaggtagcatggttatttgattacttagcataatcaatactaatgttactccttgaaaggatgactatgcaaactatgcctatttgccgattggacgagattcaaattgtcttattgcaattgttataggggctaacatctataacgaatttccatacttgtgttgtcaccgatgtaaactgactttaagggg

SEQ ID NO: 9622 - DNA, 604 bp, Zea mays
cagcaaagtgcagtgggatatgatcgttacgggtggcgggttgcggtatcaccgaaaattccaacgcgacgggcgacagcgacggcgcatcgaccggaaactgtcgtgggctcgtggcgcgtgcgttttttttttcccttctccctcccggaactcaagagagagggaatcttgcatgcatctatccatgcatcaatccatatccatgcatgctagtcattttcaatatcggtacctatgcaaacggaaataaaccacgtacagacagtatattatatatattgatctgcttgttactgtagttgtagatgcaaaacctggcatgtgtacataactacatatacgtatatatatgctagaagagtgaagagctagcatgcatgcagagactttttgaccatgcatgctcagctcaggtgaacatgttaatgttactagcctgccttcttctgatggagttggtgacgaccagactagacaccaccagctagttgagcagcattcagcgtgtggtcgtcaaagtctctctgctaggtagagacaagccgctagctccattcctcggaccccctgggctgacgctgatccgacccaccaaagtaca

SEQ ID NO: 9623 - DNA, 730 bp, Zea mays
cagcgcctcttatgttttgttttcctatttgatgctcttgtcataaaacatgacaatttgttttcatatgcgcaggccttaacacaagcttcaatttgggaacccttaggtgcagcctttttagtgacaagggagcggccttttaataagagtgtgcaaaatatctcaaatattaatcctgcgagtatatgtggcaacaactatctgaatcctgtagatcctgctctgtgtgcgttgcctggtattggtttgcatctgaataccgaagccttgaatttatcagacatgccactcacaattaatcatccactgatagctcgaacaaactagtccagcaacagtaattcctggtagtgagaccgttgttcatggcagcgaggcgttcactcatgttgacaataactcttgtcagaaaaccatgcctaatgctgacacgactggccaacaaattcacaagaagagaaggtcaatgaatataggccgatcgcactctcttgatatctagaggacctctgctgatggagacttttgggagtacttttgcaggcgcaaattacaaaaagatgatggtgaatcttgcagacattgtaacctgtagagcgtcacaatgcttaacaactgtaaggacttcttgcaaaaataacagatttttccccatgtactctttatctttgaccgtgaggatatcaaatgcttttgaagcacgcaatatgataatgttctacttggg

SEQ ID NO: 9624 - DNA, 798 bp, Zea mays
tgcagaggggcaacgtcaagaaggagtacgtgaaccgggcgcgctgagctcaccgtagaccccgccgagccggtggacgtcagccggagcatggatgtctggcgaactgcgtccgggccagtccctcgagagggatcaaattattattacgtctgctttggtggaccgtcatgtaaattttgtaggagggaaagaagaattctttagctagttgccggagcaatccgtataagatctcccgtgcttccgtttctgtttcgttttgacatcgatgcatgttcaggaccatataaaactaattacaggcaagccgcatgcgcaagtgcgtgcgcagcccaatcaataagtgaaagcgtgtcttgatgtgttctttgacgggtgccccattgtttctttccgagagagaccgcctactgcataagttggattttttcaactcttcagaatgctgatgcgaaaaaaagaataggaagtgagctgtaagtttacaactagtttatacagggaagaaactttttgagagaagaaaaaatataataaagccgagaagataaggaaggcaagcccatggggatgtaaagaaccaacgtggacgtctaactcatatatttccttcagttccgaattagaagtcgttttaaacaagatgtgaattaaacttataaaaattttgacttccaaataaccggttttattattttaagtttaaaaatactaatagtccattttgtacccaaattttattttttaaaaaaagttacctttattccaaaaaaattttacaaattcttctttaaa

SEQ ID NO: 9625 - DNA, 996 bp, Zea mays
ctagccatcctaatggccatgaccagttggggattacaaccatcaaaaacacccctattcctatgcttccaaatggtccaagcacctagaatcactaaagaattgaacccttctctcacaagatccgatgcccgggagctgctagacttccaccacgactcaaaggattcctcatgagctggatacagatcccgcagccccactgaattaagaaaatcaaaccagaactgcttagcaaaaacacacttgaccagcaaatgatttatggtttcagcctcttggtcgcacaaggggcactgctctggtcggtccagccctctttttctgagcatgtcagcagtccagcacctattatgttccacaagccaaataaagaacttgcacttcccaggagcccaagatttccacacccgctctgctggttcgaattgaactgaaccaaggaatagagcattataagcagaactagatgaataatcacctgaagcgctgaatttccaaaaatgacgatcccttattccaggctggagcacaacagcatcaagtacttcacaaagttccaggaattcagcgatgactctgactgagattgccccttgcacatcggagagccaatggaaattagggagagcatctttgaccaaccgactattggcaagacgcaaaggcaccaactcaaacaaagcaggagctatgtccttaatacatctcccctacaaccatctgtccttccagaaaagggtattagctccatcaccgagcttagtaaataacggctgcaacgatcaaatttttaaccaccttacatacacgagtggggaaatccgtccaaggcctactgggaatctgtttttctgtaaccattggccaaacgagcctcttagaagcccaacagaggcttctttaactcactaattccaaaaacccacccacctcccttgggacggggtaacctaaggccaagccaagaggcaatgaccaccacggaactttttc

SEQ ID NO: 9626 - DNA, 829 bp, Zea mays
tgcacaaacaggtggacattgatcaggttatgggaactgatggttgcaaaaagcacattgaccagattatggcaactggtgattgctctgacaatatgcattctgatatgcattgcaaggaaggtgggtgtgttaatccttctttggctgaccctgaacaaaaatgtgatggcaattttccagatatagaaagtacttctatgcagagaactgatgtagtcttcactatgaatgagactgaacaatcaagcagtcagaccagccacaaggaacagtgtatggatttgaaaagcttagaaccggagtcctcatctttgaataaccaacaacatgattcatctgtccaatataatgattgtcataacgtggatataaccattaaaggagcaagtgcaccactgagttgcggcgattctgtgtcttgcaatgcaactaacaatgttgaagctcaacctgttggtggtgctgaagaagttgtgtcgagtagccttccatcagatgcacaaaaaaccttgctgggtgcaaaagataatgaagatgccatcacaaagaatcagggcaggaggaagcgaatgaagatggttggtaaggcacagctagtgcaaggtaaccaaaataagcagaaagaggacgagacaaaggttttcagagctgcattgagaagaattcttataagcaaatctccacctgtattgacgattaacttgaacagattcagccaggattctcatggtcgatataagaaactgaaagggcatgtgcgctttaatgagatgcttgatatacaaccattcatggaccccaagtattgtctacttttgaaagtatt

SEQ ID NO: 9627 - DNA, 820 bp, Zea mays
gccgcccccccattgaattgcatttccgcttgcaccactgctgctcgcacaaaacgcaacaagaaaacaagaatgagaataatggtttgtttttcttcattttgttgccttctgtaagttgcatttgcatcgtaacaattattgtcgcaatggatagaacatagaaggtctggatctgtacgttgctcaccatatgcccacagccgaacgccagatccttggcattggtcaggcagatcgggcacacctggtcatctctcggcgccgcggcggcgccgccgacgttgctggcgcccctcctcagcgacgacgcctgccgctgcgcgtgcggcagtggcggcggcgcgggggcgactcgcttggcgttccccgtggaccgtctgcgcgcgttcatgttcatcaggtttagaaggcctcgttttgaccaacgcgtggtggttctgctgcaacgcgcgctagcgtcattaatttcgtaccccaggatgccgagctccatggtggccttgtactggatggggacctccatgagcgcggcgagcgcgaacgccgactccttctgctgtgccgtcgcggcgcgggccatgatggcggtgaagttgacgaactgcatgtacaaattcaggcagggtatggtgcggcggtgccacgtacgtcagtcacatagtagagtgtttggctactagctactaactgggtgagtgagtgagtgacggctttcgcttcacctggaagttgtcgaagtcgcgcgcggggagcttgtcgtcgaatctgcgcatgtcgttccaagggccgtccccgaccccaccagaacgaggacagg

SEQ ID NO: 9628 - DNA, 809 bp, Zea mays
ggatcctttgagtcgacctgcaccagcatgctcaaggaggagacgacactcctatgttatagagcaaagcacactttagcggcctctatcagggacctggctacaaaagaccatagacccccccaccccccaatccccccttgatgtaatacctccggcaaaaaatgtacataatttaccctgtgtgggctttccctacaggaaattaatcaaaaaaaaactcaacgattttagtcaatcgccatgtcgtcgttgtgcttgcctcaccgttgtcgggcccataaggttgcgtccatgcagtattcgtcttcagaattcagagcatgatatccgagggctttctatttctgataaatggtgaaaagcccttgttctcgctgtgataatcctcgccacacggcacacggaacaccatcaattcgcatataaaagaagggtatgtcatagtgccttgacgagttgtagatatcatccaagccccgaatcgacggcgacgttcttgttatcctgccggtggtcaccgtctggcgagcgtgccgtgcccggaaagtgcacgctctgcaacgcccccaatcggccgaaactcctctcaatttagtgctttcctctacgtgatgaaccatttccaggttcttttgacccgtttacttgtcacactccaaaaggtgtccatgtcccggaaggcctacacccgcctcctccctaacggattagatattaagacttaagtcagtgaccgacccaattagtcactgtgaattaattgatggggaatattctatcttacccaaatacgcaggaaaatactg

SEQ ID NO: 9629 - DNA, 815 bp, Zea mays
cgacctgcagctgaacctgggaaggctgattgtgagcttgcccttgtagagaacagcaggcacctggtccattcaaaagccagcattgtcaggtggcttggacccgttgctgctgaatggtatgtatgaccagggtgttgtgcgccagcatgtcggtgcacaggtgaccaccgggagtgccagcagtgtcgcgctgcctgctcctggacagaagactcaaatgcttgctttgcccgcaccggatggttcgatgcaaactgttggtggtgatcccttcgcggcgtcccttgccgtgccaccgccgtcctatgtgcagatggcagatttggagaagaagcaacagctcttgacgcaggagcaaattatgtggcagcagtaccagagagacggcttgcaagggcaatcgagcctgaacaggctagaccgcgcccccaacccggccatgccctacgggatgcccatggcatacaacacgaaccccatgccaatggcttacgcagggaacactgggtattactaccctacttactgaggaggcctgttctttaatcatccttacagttgctgtgaatttttgttctgtgttgtgatcttccccgccctgcggttgtgtccagcatcagctgttgttcccctgtccctggatcaaaccttttggtctgatatatgtaatgtaattttctttgtttggaaccaaatgcagcatccgagggtggtggctatagttgaataccttaatctcatgttgatctttaccactggtttttactggatccttccgcttggtatcactttcttttttacaccaatttttt

SEQ ID NO: 9630 - DNA, 497 bp, Zea mays
gcagcatgcctattcgaaaccaaacggggcctaaataacaaaaaaaaaaacgagtaataaagctcgcagggcggggtgggggtatccgaatatctacttttctaccacggcgcaggcagcagcactgactcatctctatctccccgttggctttatctttctagaacactagctaatgcccgatttatttgctgcgtgaaagctgtttgtctggaaccaagcaagcagtcctactggcatgacagcaacttggcaagcgttacttaagaggtctcgacttttcttttatcacactgatgaagttccttgtgagagaggcatgcttaccatgaaacctttgatgctgatggctctgtccctgctcgcccctttgttcccttcgtagatgagctccgcgagctgtgggacgtagtgccctacaagataaaaaaagacgtacgtaactacgtatgcggcggcggctcgcgcttaagaacacacaggttgtgaaggctttt

SEQ ID NO: 9631 - DNA, 804 bp, Zea mays
tgaccgtttctcggaactcactgcgatgattttttttctcgtgaaattttcactgttttttaccttttctcctgattattgctataatcttttgtctctctctggcgcggtggatccctcacgaccgtgtacaatcaccgagtcgtgtcaccaacaaattctctgggtgatcaccaagctccaatcaccactgagccgtctaggtgatgccgatcactttttagtaataagccgtagaccttcacttgaccaagagaagactaatgcatgctgtgtgtgctttaggtggctctcatgttcactaatgatgtcctaacatgtgattataattgtagctaatcatgtcactatgccttttaaacttgcaatgctctagcaatgaattctagctggttgggcagcaagataataactatggctcgtgtaggagatataaataccccaaccaccccaaaactagctgttaccgagctctctgcgcatgggcgcacggtgcgctcccaacggctagttcggacaactattcgttgctcaaaggtgcaccagatacagcatagtgactatccggtgcacaccagccagtcccggtgcccttttaaaaaaaatcagttgtctccaagtgcttgctctcgggttctgggtctgctcttgggtgctctctaactagctggccgaggggaccatcggacagtctggtgccctcaatggcttgataagtgaaagtagcatgtgaaaacatataatcacacacaccaccattaaaagatcctgagaacatatcatttaatatgtgaggcacacaaa

SEQ ID NO: 9632 - DNA, 746 bp, Zea mays
aagtacacctaggcaggaatccattcaggtggcagtgctaggcattgcaggaatccattcaggtggcagtgctagcaggataatggagataaaccactacgtgctcttgccgtgcacaaacgatgtgatgattaccctcacagagtgttttgaataatccaaatgtgactatcgcaactgtatgctcaaaagacaaagagcagaaaatatatataaaaaaacataccaggaatagtaggtggcgagccttgaggcccatagccaagctttgatgggatcttcaacttccgcttttcaccaacgcacattcccaggagaccctgatcccatcctatagagtagataaaggaattcagacagagaaacataacacaaccaacacaaagagtagacatgccaattaatcacctttgatcacttgtccagtgcccaattcaaattcaatcgggtcacctctttcatagcttgaatcaaaaaccgttccatcagtaagttttccctgtaaaaaaatcacagcaagtgaacataactcagaagatagttattgtgatcaccaagtattgtctagtatcacaatttcttgaaccaatgtagggtggttgaattaacagttctgctcaaagttttaaaaccgataataataccatttttcaaaatattacaatgcactattgtaaatgccccactttccagaatccaacaaaagttacaatgttttattggtaactggaattggcaataaattt

SEQ ID NO: 9633 - DNA, 512 bp, Zea mays
aatttaccagtcaatgtttgggttagaagcacggatctattccagcaacctttcaagttctgtactattggaataactctacctttatttgaaccagaactgatccagtaaaatcttctttttagaaaaaaaatgaactaatctggtctagagctaattaatccctgtaaatgatacacaaactgggctactgattgccaaatatgttcttgtttgtgcaggtaatttacatgactggctggagggagcatccatcacagcaaaaggctaagagaaggggttctgcgaccatatcattcggtgatatacagaaacaatttggtcccagtgagaactgagcctcactgcttcagaaatggtaggtgaatactggcactaagttcatttttttattatttttcactatctctttgcaactgatctctctgctaactcttagttttctgttaccagtgttcccaaaccccactcaggctttgtttgggtaaagaggaactgaagtggattgaggt

SEQ ID NO: 9634 - DNA, 677 bp, Zea mays
acctgcagacttgagggacggcggtgaccgcagccagcgagcagacaggcctgccgtctcctctcagaagaaagaccagcaggaggttagtagtactcggatcagatcagactacgctaggcgttcttttctttctttttcatttcgcgccagttttttagtatcatatgcatgtgaattgctgtgaccagcaggaccgtggaaggaagtacaaaaggatccactattctgggccgttgatgccaccgggtggcaacatcgaagacatgctcaaggagcacgagaggcacatccaagaagcggtgcgcaaggcgcgactctgtaagggaagcaagtagctacatagagcagctgaaggcgctaggactaggagaagcctcacatggactgacccagactaatcaaaagctgccatatcgaggagccgcaatagctgtctgtcacatgcaatgcaacacgacggtcagctattgaagtagtgagatgagacagctctcaccttttatatttcataggtgagaaccttcgcttgtaatgcgatgagacattttaaaattggagtgcagagaaatcgggaaggagaattgctaaggcactgtaaagtttaggcacccttttttttgtaagtttgatgcagttgtaatagccactgtaaagttgttcatcgaattttgctg

SEQ ID NO: 9635 - DNA, 475 bp, Zea mays
tgcctgcagttgtgtattgttatacagtaacttgccaacaagtaaattaggcggttgctaggtaaacaccaaacaatgtgttgtgtctggtttagctgaatatttacatctgggtaccacaaaaacatcaatagaggtctgttatatagagtggatagcgtatttacaatatggtaagaactaaagacaactaaatttatgattacttattgccctaaaaagactactttcctcatgcgcaaaacagtccaacaaaaacatttaactgatatccatcatcccagcttgcattcatgcaatcatgctaacggcaggtaagtagaatatagttcatcatgccacgaaattcatttgatgcatagaccgtaataacataaatgacgcactatttcagaggacttcataacttgttttgagtatagttgattttggaacttggaaatccataaagcactcgacaatggtaggcatagtt

SEQ ID NO: 9636 - DNA, 723 bp, Zea mays
aacataatgatcgatcgagaaattcgagagtttaatctgatggttgcagaagcttttttttcttttttctttttttgctatttagatgaagcttgctttcgctctgaatacaagtgcgtttcgattcaactttaactacaaagcaggattctcgagcatgtaacttgcatctcagtggagacagaaacactatattagctttgtgctttaggagttcaggctctgtggactgtaaatatgtatcaacttgttaggtgtaggatatctatcctcgcatgcgtgtagatcattaaaaatgagttaatatgtcctcctaggtctggtttcgttccttgctgcatatttcagttctcgcaatcaaaataacaaacgaacactcatcgctgctgattggatctgctattctgcatcgttagcatacgaagtcactatagttcactagcatatccaaccaaaaaataaaaatacaagaaagctaaagacgataggaaaacttcgtactttgagttgggtttgcatcaaacgcctcatgaactacaagctagttgagctaggcaggcgttcatctctgtttttcaacaaatactctcggattcatacgccatacaacaaataacttggctactcatcatcctcggccttagccttctttttcttcttcttcttaccatcggtggcggtcttaggttcagcttcttcggaagcttcacggctcttcttttt

SEQ ID NO: 9637 - DNA, 745 bp, Zea mays
aaccatcattgtctgaaccttttcgctgtagctttatgatgcagcagatgtgtttgtaggaaaggtttatagtaggcgcgttaagccacagggggctggtaaggcctaacggattggctgagccatatgggccaccaagataggctagaggccttatccagattagattgggtcacaggtttatctcttagttggttttggagtccctgttatcacggcatggcctagattataaaagcctggccatagaatgtaataggtatccagaaattaatatatcctccagtttggagggttacctgggtcaccctgggggcacctcgccgcatttgtgacacgagtaacactccttgtcccatccactcgtataatctgcgttccttgtcttctctcccgacgtcttccctgagatcggcaaccaatccacatcactttatctctttacactaccacaactacttattctacttattctacttattgaccaccattatttgaattgtgtatgcttaagatggttgttgacatgaaggaaacaattctcttctatctgcctcctgacaaaaccaatggaacactgtttttgctgagactatctacttgttttaatttcagcaggagggagcatctgaagatgacataaacaacctatccaaattcaaatttcagacaatgagtgatgcagacaaactagctgctggcattgcagcacctgtgggtggagtgatgacagagtgtggtacca

SEQ ID NO: 9638 - DNA, 753 bp, Zea mays
catcagagaacctgaagtatattgatttcataggtggttcttgctggatcatgtaaagctccatctcttataatagcttgaacttatacatatttggtacttgttttaaatttataatgcacaaattattgatattcgtatagatgagatgatatgatatgatccatgatgttcttctgctacttcagagctctctttgttctctgtgactgacagcaagagatgaaccaacgtgttttgttgcattgggagcagaggctggagataatcgtaggagttgccaaaggtgttgcttatctgcaaggactaagaaaggaagtgatacacagtgatctaaaaccatccgacatactcttggatgaaaactagagagctaaaattgcagattttggcaccacaaaagtgttcgtggatggccagacgaatccaacacttgtacaatagagtatggctgaaacctgacctcctcgtctgctgtttcaattcaagtacagtagaatcacttggtaacatgcatatataacatcagttagctatgatgtaagcttcctaagaatttgttttttttcatagtagtatttttccccaaactaaactgcaagataaagttgtggtaacaaaatgtaggatttatcctagccacctactctatagtgcacattttttgcttctgttctgttctccatgcgcgcccaatccgtcctcaaattacttgaacttttttttagattaatagcttactaaactgtttat

SEQ ID NO: 9639 - DNA, 820 bp, Zea mays
aagttctctttgcattgctgatgccctgattgcggcttcaattcttggacctgctaaggagctgagcacattacatatcttatcatatgcaggaccttgcatacacacatgtcccatggtcgatctgcaaaggaaccatcgaaagatgtcggcatggcgctgcacccaagggatcacgcatatttaatcgcacaacaggaacataaaacgttaagaaatatgtacgtctgcaatttcgtctccttcaaactatggtgttgtttgtgttgtattgaactgccgcgtgtgagctgatccaattgttttctattgccatctttcagtaactatatacgaattgttcgttaaacattgacagttttgaataagaaacattgagatatcaaatttgtactttgccggccccagtgtgatgaccatctaagagtatatttgtttgagttgtatttttttatgttttctaaaaagcggttgttggtttttttgatgctgagagtcgacgatagcttttttcgataatgttattagttttctaaagttaggaagctcgaaagaaatctttaaaaagccggccctccgtttgatcgttctgtcgccgtcccctcctcttctgtcctaacccaactacaacagccagtcaacacaatttcccccacaacttgtgtggacccagacgagagtggaaggcacgagcgacatcatgagttcctgaaggtatgcgtcccacggttgtatccgtaggtaggagagtaccaccctgacgaacttctttaaccccatctccaggctcgtcgtgggcttgtagccgaactgcttccgg

SEQ ID NO: 9640 - DNA, 722 bp, Zea mays
ccctaatcaaagataagggattcacaatgtcgctaacccattgccaattatccagtgcctgagcaacaattcttgaagaaatggatctgctgcccaccatacagacaacttcaggggaactcttgtatcatcttcccatttaaccatctgtccgaccagaaaagtgtattggtcccattccctatcacatttaggggatctgctttactgatttcatggcgacaagcttatactgccattggatatgccacaactggatgagcaagtgactcgctgctttaaagataaatttgtagggctgtactattagctatgaaaggtcatttccatataacacaaattatctgttaccatgcctacactatacacccagactatttttgctattgtgctcctacgtaatatttaagttagtcgacacattaataaattatgggattaatgaatgatgcaacgcatatttatagcatgtaggtattttttttttcataaagattcatctatctttatggaaaattaaaaagtggactttccttttgtaactgcatctttctatacattgttggtctggtttcttccatcaaagtccatatcctttttattaattcttgggaaagtattgatgagtccatattatgaagaaaacctcattgctggttggaccctgccattgcataattatttcagaaatgggggaatcctcttatctttcttaaaataaa

SEQ ID NO: 9641 - DNA, 774 bp, Zea mays
acctgcagcgcctcgtcccgggcggcaccaagatggacacggcgtccatgctggacgaggccatccactacgtcaagttcctcaagtcccaggtgcagtccctggagcgcgccgcccaccgcgccgccgcgctcggcgccgccggctacccggtcttccacgcgccgtggcagtacgcgctgccccacggcgacatgcgacgcgacgcgcgcgacagacgaacgcgcgcgcgtgccggtcgatcgataccatcgagctatgctagctagcgcttcggccggccggacggccagcgctctccgttgatggcgtctcgacgggacgacgacgacgtacggccggcctctctgccgatgctcttgtagcgttgtctctgtgtgtgtgtgtgcactgcatcgtgaactagctagcgcatgatcgcatgcctgtgtaaagacgtaggatccttgatacatttattgcctgctgtagccgcatacggcatacgacgtggctgctccaattttttgttggagtggcagcccgggcatgcgcgtgatcgatgagtacgtgtacgtgctggtgtaccctacggaggctggacatttacattgtactaccccttgtttatcattctctctctctatatatgcatgccaggggggtttcatggctctctctctttgtctgttcgcacgacacacgttagcttttcgcggcacaccacaatctacagggtgcgtgatgtaaacgtgatccttaaaattcgttcggatgcgcccaccccaaggcaag

SEQ ID NO: 9642 - DNA, 739 bp, Zea mays
ttgctttagtaacctgaacaacagcaagatcgaccatggtacatctgccttctttgccacttcacgcttaatttcacctatttaataatgatgttactgaaattttgtcacacattaacaatgcagctaaacctctggttatctctcataatggtgctagcggtgactacccagactgcactgaccaagcttatgaaaaggcagttgccgatggtgcagatgtcattgactgtcctgttcaagtgaccaaagatggcatactgatatgcatgagttctgttgacctaatggatgttactactgttggaaaatcatcatttacttcgcaagtaactaccaatcaacgatctgaaggctggtcctggagtcttcaccttcaaccttacttgggatgatatttctaagaacctacagcgtaagttgatttgataccatttcgcctacttttttgaaacctgaatgtttgctatgcaaaatagatgccaaatgtttagatatcctcatgtatatatagatatgctaagtcatcttttttgtgcaattcataactcgtgaatagctaatgtgtaatttttactgcactggtcacacatttgcttcaaaactaacaattttaatggcagccatgatatcgaacccaatgagcacctataaactgtacagaaattctagaaacaagaatgcaagaaatttcatgagattatcagactttttgacgtttgcaaagggaaaggatttg

SEQ ID NO: 9643 - DNA, 842 bp, Zea mays
gaggcctccggtagctccgcgcctgagctcgggcccgccgccgccgcccgcagcgtcctggcgaactggcgagcgacgggggccaccgcctcgtcgcgcaggcgcttcctgggcgcggcgtcgcacgcgtcgcggacgcgctccaggaaccggaccacctcggcggcgccggggctcgggtcggccgcggcgaagtacgtgcggccgtcgtcggccgagaggaacgcgaacgtcttcgccccggcgacggtgtggtggtgccaccggtggtggtcgggggcgtggtcgaggcagagcgcggcgagcgcgagcgccgactcggcgtcctcgccgaccgcgttggtgtggaagtaggagatgctgttcttgttgcccctggacgtcgcggcgacgcagaagaagacatcgtccacgccgccgccgtctcctgcgcctgcggtggcttcctggatcccgtcggcctccacctccatcggcacacacgacgggggtgagttcttggccctgatcggcgcgaggtcgtgcacgctcagtcgggcaggtgctcttgttcgtgcatgtgtcgctgtggcatcggtcgatgagactgtaaggacgacagcttcaagccttcaagtatgtccgatgtgcaaaggctgctgcgacgcaaaaagttttgaggggaaaactgcttgcaccccggaggtgctgtgcttaatgcagaaatgattttcaagccttaccggaagggaagtcccgggacagaaacgatttagaatgaatatggggctctgtttggcccaggaattacaccacggagaggagggaaaagaagcccctagggggcttgggttaagaagaag

SEQ ID NO: 9644 - DNA, 900 bp, Zea mays
cggtacccgggtatcctgtagagccgacctgcagccactttttgtgcccaacgctgaatccaaagataaagggatcataatgtatcatttcaatcagctaatgactttactgaaccataaagtttctatcagaaaaggcattacaagtatcaatcgtgccatcgattattagtttattactgcttggtggaaccaagttaaaatgtagagactgtcataggtcatacagatatgttctctacgggtgaaggcactaaggttaatgtgtcgagctgtgcatgaactgagcaacagaaagtctgagtaataaccattttcgaatggaactatggaagtctagaaagcctaaccccacacaaacagaagcactgcaaaattaataaacatatgattgttgcttagtagaaatgactggtaagaggtcttgccaatgaagctgttagaggtaaaacaaaatacattcttttagaagccgttcataccatggtatttgtgagcgaggacttgccggcattgggcgcgccgacaatgccaacggaaagcgacatctggtcttcttccctgacctccccgagatcctctttatcctcgtcaggcgcctccagcgccgcattgagcagggcgagcgccacgttcccgggagcgggccctatccctcctaataaacggctggccgggccccaagcccctaaccaaaaaaagcgcccttgtccggccccccgccccggaaggggagggggtcgaaacccggacctttcctaaaacccccggcgggcgggggttggtggaatttttcccggaaggggggccggaacccagggggtcggggaggggccaaaaatcggcgccctgtcaaaaatcggcaaacgggcaacgggggggccggggcccaccgcgggg

SEQ ID NO: 9645 - DNA, 725 bp, Zea mays
tatctaggatggcaaattcatcatcatacaccctccatcttgagaaggaaccactactactttcaatagttatcaccactatattttgtagaggctattttagcttagttaaaaactcatgaatttcaaataagatgtaatcagtttatttgtcttttctttttgcagtgtgtgctgctacacctgtatgcaagtctccaaattcaatatctatgacatatgtttgttaaacaactgcatctattttttattcttttggccataggaacataactttctgaggactgctatagatatggaagtgaaaataatgcaagcgatgaagcccttagaaaagcagcatcactataccggaggtgctttgagaaatattgagaaagagtatgaagatttcaacagaattttatcttctcaggtaagtgctgactgatctatgagttactttcccacataaggcatgtttagttggagattacttgtgcaattcttgtgtaagggttattttgaaagctcttgattggttgtctggttcgcaggcaggaaatataggtgttatggggattggggaatccatatttaagggtacagttaccactcatggaccgagttgctgattgggatggatttgaataaccttcttgaggcagattaatattatcttgggcatttaaaagcgaaatatttttttggatagctttactacttaaaaattatagacatgaatt

SEQ ID NO: 9646 - DNA, 728 bp, Zea mays
ttgcagcgccccctttaccctatgttggcacaggaactatgggtttgtgcagccagacaaatccacgagatctagcacatcgtcgatgatgaccggcactaggggaacagccgctacgctagcataggggccaccagggtgcccactgcccacgtggaaggagcgcgagaacaaccaccgcatggagcgcctacgtcgtgcgatcgccgctaagatctaggcggtgcgttaacgtcgtcctttaatttctcagcacaggtaacccctccccttgcacttatattttttctttaaccttttagactgaacgtattgaagaaaatatattacttaaatgtacattgtttttcggcaagcggttgtgcatacaagtctatatggggatcatgcataatttacatttttcaatatggagaaatgggcagtaatcataaagattgatgcttagcttcattgatcgatcattttgaagattgatgccatggacaattagatacaactaacttatccatgcgaaagattgtccaaaccgtgagtgtcatccaatttcacatattcttaggaatagaaataagtgtgcttggcgtaattttatttatgtttacaatgggaaaatatttttagttttacgacatatgcaactatcatgatcaacggccaagctcagggcctaggttggttacatagtaataatatgatattagacacgcatttgatgcaacatcagc

SEQ ID NO: 9647 - DNA, 830 bp, Zea mays
agttgctttccgcttgcagctcgggatcaggtgcatttcttggccgtgatgattgtcaatttgatttttccgtgtgacctcgatgagcttcaaaatgcccatttgatatctcacatagttactaaaatattctgtaatgtgacattgttaattaagccttaatactggctatttgtgacaatttgtatctactttctgggaaagcaatgaattcccttctctctgaacacaaacataattagtattaagccttacattttgccatcatgcattgagaatttgacgagttaaacctaatagagttttagtgtggagtaagggcttcaaactggaacaacagagcatgttcgagattttgatgggtaaacagatgattgagtattgtatatcaggcttagcaccgctttaagaattgttttcattagttgaaaaactaatgacactatattagacttactcagttctggttctgattctgctttctgaatagttttatgttaagaggacaatgactacaccttacctaatttactttacgaatcatgatttatgtatgcattttcagttcttgcaaatgtgctacgtattagatcagcacaatagtttcctattttttttaatatatgtttcttaggtgagaggatttgttcttatctcttgaatgtcatataccttttctggacaaccagaaaataatttccgtattttccctgaaatgtgctttatggaataggcatgcagtaggaaggccaggtcaagttttattaaaactgaaatcatcagcatttgatccaaaagaaaaagtgtggacaaaagttccttctggaggc

SEQ ID NO: 9648 - DNA, 840 bp, Zea mays
cttgtacccgggatcctttaagttgaaccggcagtcttttcccccgagcagagccttcgtctcgttcctcttctggaggccagtttggaggcgccagtggttgaaagcagcgtccggcgctagggacgccaagaaccactggaccgagtggcgccagtacgggacgcacctcgcctcgtatctcaacgcagagaagggcggccctggcgtactactcgggcgacagtatgaacggagacacgcgcttaacgggcgacatcttggtagcgacgtacaggggtatctgcacaagcacagtcacagccaagccaaccccatgggaatgggatgtttgaaagcaacagggtgaaaatccttggtttattacgacagaagagcagctagaattcgaaggtaataatatatatacctggcactgcacgtctacgccgtattgtttgtattccacactcaagctttagagaaaactgggtcgacgtacctgaaaagaccaaaaatgcattagccagcacacgtgtaaagatactgtcacgtagaaaactcgacagtacctaattgcccgaacgttatgaacagaagtttctataatctaatagttacgtgcaaactactactactatctatctgtgctctgctgcatttggctggaagcatatgcctctctggtaccgtggcaggtaggaatatgtacaaccggcattgatgggggtggcagaacattcaatgccgtggttttttctttggaagggacttcacataaaactcaaaacgtgggaagaaattaattatcctattttttaatacatatttacattttttccagtttttcccaaacaaaaa

SEQ ID NO: 9649 - DNA, 758 bp, Zea mays
  unsure (1)..(758): unsure at all n locations
tgtcagggcagtataggaatatacgtggacgattagtcactctgcaatgacaaactgagggtctttgggaaaaccatgaatgggagggtttaacataaaaattttggttggtggttgataccgaacccaattaaaatggtattacctgatcaatattagtgaaacctttaatagggtcgccgccaacaattgtattccttttatcaccaattggctgcattatcagtgcctacaaatacaaactaagttataatgctttgattcaaatacttctgataatccctccatctgacttttggatgatgcttaattgcttatctggacatgaaaataagacttctttcacaagtaaatagatggtgctttggtatattattttcataaggataaaaaaaatcagccatcgagagtttgaacaagtatcaattgccccaaatatatgcttcaatttaaaatatttctaaaacaaagcaaatcagaacctgtgtgttagcaggcaagaacggcaattcagacctcccaggatacaaagcaagatttgccagaatagattctgcaagaagactatggtgaagtttctagataaaaatctgcaagaaaaatgaaggagtttttgaaagatatactcacgttttttggattccatgggaccttttggataaagagcccttggataaaacttttggacattccccatttaagggcctttaccctttttttttggagacccccngcgaagcaacaccccggtttttgga

SEQ ID NO: 9650 - DNA, 683 bp, Zea mays
tctcaagggtgcgtggttgcgggctgggcttacgttatcatggcatcggtaccgcgtccacacacatatatgtaatcgctctcttgccgcgacaaaaacaaaaaacaaaaaaaaaaaaacccgcgtttgatcactactggctaaggtagctaaccattaccatttgatttgaccagactgttcacatctctgtcacccaaaacgaaaatgacggataggtgcacctggatggagtagcgtgcgatcgtatactccctccgtttcgttttagttgtcgctgcatactacaaaattaaactatccagtgacaactaaaaagaaacggagggagtattgtttatacggccaagctagccggttgtgattttatctggttattagatgggtgatataggtaaatccaaatatgttttttttttcacctgctgtcgagaaaatgaatgttattaatactttttttcacggttggtgcatggtgctatgctatcatgagatatttaggggaattaatccaggtgcatgcatggggctatcatgagatatttagggcagaactctcgtcggctgaacgcgcggctctcaaagtcacatcacatcacataacatcacatggccgtggctttcttgactcggtttcaatgcaagaacaatatgtgtttgaacttttgaacttggaaaagcat

SEQ ID NO: 9651 - DNA, 518 bp, Zea mays
ttgcatgccctgcagcacggggtccatcagctgaagcaagggcacaacaaaccggaaagaaacgcgcaagatcagtggccaactcgtctactaagtctgaggtatggaaagacttcaagttcagcagaaggtgaacccgagtgtttaaccttgcaagattttttttttttttgctgacagtaggaatggaacgtcatctatgttgaggcatgttaaaaaaattaacttccaactactgtctaatagagctgaagtgagcaactatttcctgcaatatgagaaaaatgatgatgggtctggtcgttacactgtaaaaagggatatcatggccatgtgtttgaaaggggaagaaaataagtcactgaagctatcaataataatcttggcagagttaatttcaccttagataattggcaaccagattgtcaaaattacaattgtatttgcattactgctcattatattgatgctaaacggaaattggataagagggaccatttggatcaataaattgcatc

SEQ ID NO: 9652 - DNA, 745 bp, Zea mays
tcattgttgttgcagaactccataactctgtcgggctgtggtgacaatgcacgtcaagatcataaaccatgggaaccagctaaaaagcagctgaataacagatgatactgaccccgaaggtaacaaagaccatgggggcctcgtgcattttggccctgagacccctctacactatcgttctcagtcggatcagacctttaagcatcaaacaaataaatcatgacatcaacaaataaaaaaacaagaatcttacaataataatctgacagtagcagttcaaatactgaccatagaagatccatcagaacaactgagcctgcttccatggtaattggtctatgaagattttctatttgctctatatggttgattgaccgaccaataccaccgtgcatacagattatcttcttttctattagtgcagccaaaggaagccaattaaataacctgttcacacggtgccaggtccagattccatcccgctcacccttttagtggcaaataaaataacacatgtcagcagaatataggacagacatagaggaaagcaaagattcaaccagactctaccattctttctatgcactcgattcggaacccaaatagagcattgatatccgctgcttcatgattccctcggattaagtgtacattgtgaggatattcaacctgaattatacagtgaaacatgttttttttagaaaataaatgacgtctgataaataagggctgctgcaatgaatac

SEQ ID NO: 9653 - DNA, 788 bp, Zea mays
aatatcaaattgtgacagggctaataaaaaacaactatccatgtgtctaaaccttgacttgtgatttctattgttttcaattttatcctattgtaacttgtttgggactaaatgctttgttgtttttgaaaattaacagtaggggtgaacccctactgtgataagatttatagataaaggagttcaaagactgtacatggagaaggctttgttgttgttactactaaaacacatatgaacatacagtgcaagggattgatgacccactaagctcaggcactacagatatgttctactgaggcctactcaaaagctggtcatttggacagcgcatggacatatcgattaatcatgcctttagactgggctccgcgttttatagtgaatggcctcctttcactatcaacatcgaagaaaaggatgcatgaccaacttgccaacggacatggcgatcatttggcacaggactgatagcacgcacatactaatgacaattgatgataatctagtaccagaaagtccaggtccagtcataggttgacagcacgtttttcttgaactagtaaggaaataaaatgcttgctagtacaacctttttctttagcacaaaaatgcttattaccttgttactgaaaaacaccctctttcccggcagttccctggtggactgcacccaggagttgcaggcgaagtgcaccggaccacacggcagcccaccctcgacgacgatgctttccagaaagaactcccgatggtgcccgttggccacggtgatggcgccaggctcg

SEQ ID NO: 9654 - DNA, 490 bp, Zea mays
gttccatcacgacgacgccaaccacctcagctcactagctcccgcggacccgcctgagcgcagccaaaaccggggatcccaggcgcagcagctaccatggccgcgccatgcagggacctcacgggccttcgccgggggcttgccgcggcgaggctggcgccgggacgccggggcgcgaacaagctctgcctcgcgccgttccaccaccgcgcaccgccgccgcagcagcagcaggggaggaggaggcagcggcaggggctcaaggtggtggctgccatcagcgaggacctgccgaggctcgcggcgcccgggaccgggaagggcgcgccggagggcaggcggccggagaaggtgctggtgcgggccgcgctcacggtgcgccgcaagcacaaggaggacctcaaggaggcgctggccggccacctcgacgcgctatgggacatggttggccgggagcgtcgcgctcgagctcattagcaccaagatccac

SEQ ID NO: 9655 - DNA, 777 bp, Zea mays
tctggaacgaagctcaaggacatacccaatggtaagctgaggctcttcaaacgtgttcctttctttttgtcccactggagcgatctatctgcttgcctgtgccatttcattgagtgttaaccgactctacaagatctacatagctaggtctttgtctgacaatggttaatgctctgtccgctcaggggtcaaaatagtttcgaaaaaacattcttttggacagtacggttagtctcccgagggacctgtttgcctcgtttttatggctatgatgtgatctttgacactgtagagttttctagaataaaactggttctgctagatatctgacgctgaagccaaagctattagtttggggatggaccccctaacgaggagaatgcaaactttgatattcttgtgcaacatgacctgctaaacaaggacatatccaatttgagcatggcttggctttatacttttcttataggtgctggctcttccttgaacttatcatcggtggctttataggaataaaaactcgtggtgtggcttcaataacttgcagtacatttcacaagtttattcccataggttgtagcagacaacgtgctgctctgtccaacatgataagttctgtagggcatcagctgaggtgagttgatgcttgagagaaaaaggtcgccaaatgagggatccacatgaccctttcctttgcccagaaccttagcttttgtggtgaccccatgtgccaaagaaacaaaaaatattccccgaatttttttctcaaaaaaattc

SEQ ID NO: 9656 - DNA, 823 bp, Zea mays
ccgacctgccgcatactaatgttttgtacatatacgagaacaatttattgttgcttgcaaatagatcattgcatcactttgtgtgctgccttaagttacccaagggcattaaaattctgttcttattttggcattgatatgcttacttgagcttatctcacttccagtgataaccatcatatggaataacagtttttgttatatgatttttataaaatcatttccaaattactcctgctgcaccgctgcattatacatgtgatggtttgcaggtactattgatgattggcatgagcaaaggtgcctttgctgacataactctattgagaagtactgaggaacgagttgtgcacttgaacaatatattaaaacttgctttattcaagaaggatcgttctctatttgcaattggaagcccttggaaagcagcaatagatggtggtgaccccctaattgactgctcttgcttgatacaaactgccatcaggtatgctgttatcaaacaaggtatgatgaccaacttgcaattgtgctgatatgaacgtacttcgacagatgtgttaaagaaatggttcaagttgacctatctagttgcacccactggaaccgtttttgtcggggaacttgtggattatatttgtttcaagtaccttaattttttaaaaaccttgtttatacttactgcatgctgtcttctcatggaaaacatctttgtacctgacaccgctaccctttttattggtttctgccttggtaaggttgcaggttgatgacaatgtctaactaaaaagaatgtttatgaaatgttatccttactgcattt

SEQ ID NO: 9657 - DNA, 785 bp, Zea mays
cctttaaagctctagcagaccacctgcagctttattacgcagatactgctacaacattcttgtcctcggaacatgatttattaattgaaggtcctgttgtttttttccgaacaactttcacaaccttttttattattttcttttttgagggcttattatacccagctgcatggtcaatagaggagtcacctgtagtttttacttcaacatcctcacccatcttctgaacaggttcctcaactttaactttactgtctccatcattaccttgctgcttcatatcagcatcacatttctcatttttcatatcactgcaaccaacaccaccctcttttaattgatcagcatctaaacttttacccttattcagctcccctgaaactgttaacaaacgacttcagttttgctctaataacagacaggtaaaaaaaaattcaatgagatgcaacatggaaatcttccaaaccttgcatctgctctttcgaatcaccaggactctgaaacaaggcaacacagatttaaaaaacttttagtgagaactccaaagaaagaaagaaaagttattcaccaaatccataatgggacaaagtaaccttttcctttttaacagtgagttcttccctttctgcctttgattttttgtacagaatccagttattcttccatatatccactgaaggcaagcattcagacaagtttggcacaaacagaacagtaatttctttatgactgaagagtccatctttgcctattctattgtaatgtacctgcatgtgtaaacattc

SEQ ID NO: 9658 - DNA, 783 bp, Zea mays
gatttaacctgcacggcccccacacggccacaccagcagcagcagcaatggcccccaaaggcaccttccttttggtaggtagaaccatcccgaggaagtcaagctgtccatccaccgttggcgttggctagggaaaaaacgtaaaatacatcacctccccacaaagtgacacgaacactagcggcaccccaccccccagcccccacaccaccactgtacaccactgtagatccttcctcctcgtcgtttcctcagcgactactttaattgctgttcatcgcatttgaggaggggaggccgggaccctggaagcctgctgctgctactgctttctagtacctgcccacctgcgcttgcatctgttgcttccctgctgctggcctgcgaatccacctgcatttgctgaggctcatcgccgcgtgtactcctgctctgtggtaccaccactaccttgtccttttgctctctccgttccatctcaacctcgaaatttctcctttttttttcacctgcaatccgacttctcgctgaagaccggggattccttggttttcctttgttcttcagggaggattcaagaaatgctcggagttgcattcggtggctgaaacttctagaagggtttgaggtacagagtccttctccgtcttctccatgatctcaatctcatcggcctcccaaaatttgtcaactttttttttctttcttcttcttattcttctttcttgattctcttcttcttctctctcctcttggcccaggtcttgccccgctcctactaac

SEQ ID NO: 9659 - DNA, 845 bp, Zea mays
gcaaacaagcccggggtgggtggccagaatggcaccgcataaggctaatccttctggccgcttccatttaaatcggcctcctggttctcgcaacgtccttcaatatgcatatagggtaaataagtaagccacaactgacctaatctgacctgatctgatttctacctttcattcaattgtactacatgcctgtgtgtgcagttgtatgtgatcttcttcagtcctttcccggccttccctaatgcgctgctcgctacaatcaccagcgagtaagatcatcagataccagcactactgcattgttattaactcactctgctaccgatccattattccattaatttgcggagaaaagaaacgcgtgcttaattggctaattgctacggcgcggcatgaattgcatgcagcttgacgattctgccctacgacctgcgggccatcagcgggatcgccgtgcagatcgaccagggcttcctgccgctcctccgacgtatatgtttggtctgtctgatcatgttctgcgagcgagcgaatactcggatgtgcatcgcgctgaatgatgcgtctctttctcttttgctttggtcgtcgttcagagctccccggcgtgatagccgtggtcccggacaccctgtacaagcctctcaccacgcactcgtgggacttcctcgggctcgctagcaatggccagataactcccgcctgggcgtccgccaggctgggagtggacaccatcatcggggccatcgacacaggtaaagtaattgggagtcgattaatagattttgattttttttaacaagtatacggggcactagtacttcatatggggcttcttgtgatat

SEQ ID NO: 9660 - DNA, 807 bp, Zea mays
tcttgagtcgacctgctgaattttaccgccaggtgggaataataatttggccggcaccttggacagggtggttataatggtaatcaaatcgcctaataaatcctagttgccatggcactgatcagcctgactaatcatagtgcataactgatcgccatgacaccaatcaacatgactaatcgcgattagtcggatgacttgataacattggttgctatgtaaatcaagcacaaaatgccacacaaggatagctaaatgactccagaataaaacatcaagagtaaggttaacactcaaaaacatgctacatgattatatttcatggagccaagaatcaacccttgtaacaatgaaattggtgtacagaaggtgttagcaaagatgcagtaaacaaaatttggcggatcagggaccaaaatagaagcaaagcaaatatgggctctacaatcaactttgacttagaaataaggtggatggcaaaattcatttatgtttcagataaaattaacatattacaagaaattgaagagtggtcctatgatgaacccacatattacctttggatgtgcaagcagaatatggacaagttcatgccactgggaagagaagtaatttgtcaacagatgaagactacctgctacaagtgacgcatgcacaagcggagaagcaccaacattgttattctcctaatttaaaaaacaacaggcttgttaccagaattagtatcagatgattattcaaaaggggaccacacattaatgaataaaaacattttggtttaacccattgagaccttctgttcaacaa

SEQ ID NO: 9661 - DNA, 787 bp, Zea mays
gcagatcgggtgattaatactcagtatggaattggcacagatggtcgatgtacaggtacatgcattttgttaagctatatgctaggctcagtgttaagatctgggccttttgggtgacttgacagcttgtgcagttgcgcctgagacatctattactacactgttcagtttttacttgtcggataccattataaatcatgttagtctgctgcattaacagtatatgtcataaatatgtactatgcttgagatagcttgtttcaaacatgaaatctgtgtgagctcttttattattctgaggggtgtccctcagatatccttatatgttctgacgatgtaattttatttcaagagacgaagctgattttggtgtcggattgctacctaggttttgacttttgacttggagtattattttgagcattctcgccaagggttgagtgcttttgttaaagatcaaagcagtttgtgctgttacattttgtatgggctgagcaaccagctcagcttcagttaccttaacacactgacacagctggagacactagccaatttgcatgaaacaaaatataacctcaggaatattggcactttaaatttacaatagcccgttagcgctttaaacatcacgggtacacaagtttacaagaaatttccaaagcacttttaccccgcccacttgttccatgaatgctttcagcactacataaaactaagtaataactgctgcctaacaagggtgtcagtagactggaacactagccatttgattccttctaaggaacaa

SEQ ID NO: 9662 - DNA, 803 bp, Zea mays
aactcatactttaaaagactattttcctccagaatgttcttgttagtttagcacccaatgctgaagcttaatgaaattgtttgcacctcaagagtttgcacttcatatatttgctagtgtactctggggatgactgaatgaataattttgaaattgtagctatgctttcttctttctaattttctccccacatttccacctgtagttggaagtgaattttaaagtgttggtacaagtgcaagccgcagtgttgactaatattttcatctatagctacgtttgtcatgatatttgttttcgcatgagccatcgaaaccatttccttcctgtatttggataactaataactatcccgccctgtatcctaggaggattcctaaattagttttgtgctgatacatctatattaagctcaaatgaaacacgattttttttatcaacacaattcgcctccttttcggttgaaacacaatttgcctcttgttacagtttgaacaagagggcctcgatgttggatgtgcaactggagtgccaagatctggagagaatttctatcgtaaatcgtttgggaagatttcatggccggaaccatgcagcagcagtcgagagttcatctgctttaaaaatgacttcccggagaatttttcctgaaagacatgtcatgtcttttgcagtcccttgaaaatcttcctgaaggaagaccctgtttatcactctaatggaatgatcttcaattacctctctagccactcaaatgatcctcaggtgcgccccgtgattcccatggttcttatccatggcaa

SEQ ID NO: 9663 - DNA, 799 bp, Zea mays
tcggtacccggcttatccggtagagccgacctgcagcagccaccaccttgagaagagctaccagcacctccagattggccagggactacatatccaactttgatcccataagactgcgaatttgacaaaagatgtatgagatcatactcatgtgccggtaacaagatacgtgctgtaagcaagcaaaatgttatggagagcaggacaagggttcctggtgggcaaatggcatttttcactataggagaatatctaattttaagccagaccagtgccggaggcttctacatgagtggggtccactgggagagggaaaaaccgaagtcttgcccttgcaaatgcggagacggttgcttcgaacccgcagtcccgcaatgactcggtgagaatatctagtttccataaaaaaaacagcaagtttcaagagaaaacaaggacaaacaggaactgtgcctgtcgatattgtcctcttcagttttccatgtttggctaccctcactccaacatttcagtttataaaggtagtaagaagaatttaaactttctattagatagacttatgcacatcgtaaggcagcccatatacagtactcctaaaagaacacaaaggtacatgagtatctggcactcatctcaggaaaggttttgggctgtaatacataggttaagaatctacattagttctttaaatggtacctagagtaatatcgaaggggctcactacattttccttaagcagagcaaaaggaatggtttgagatcaaaagatacctcattagatacatcgaaaacgccatct

SEQ ID NO: 9664 - DNA, 724 bp, Zea mays
attgctgttgagtgtgtctggtttgtatctctaatttctgatttcatgaattggtttacatgtcttacgaacctaacaccctttcactggtttgccattatgttgtcattgatatagcacatgtgtctttcatataatctttgctgaacattgctcttgaccaacatggttaacaggtctgacggggaaatggtattcgtggacgataagcagttgaaagctaaggagcccctggtggtatgacctcattgttttctcatttcacataatgaagtaaaaatggaatgacgccacaacaattattattctggtttgcagcttattgattactatgagcaacaccttcgctacaaccccacctcgtgataaggatgcattgacgctgctgggtttcagttgcatgtgctgcacctatgtttggaacaaatggaaatgtatttaaatgtagcattttttgtgctagatgcatttgtagtattatttgagtaagtagataattagtaagtagccaatgctgagtgcaagtgaaacatgatagcatggtttgtcaaactaactgctcgatattgttactgttttcaaattgtcttattaatcgtgataatcatgattaatcgttcaagtcgatttggaccaatagtgattaaatcgtcaaagtcatcccattaatggggattaattcatgatttatccgtccaaaatcgggttagctaggaatgactag

SEQ ID NO: 9665 - DNA, 507 bp, Zea mays
aatgagcattggccgccgagggagcgcacggctgcccagcaggggggctaagggggaccatgtgggggatgaggcatgggtgcccacggcctacaccatagctatgtgatcggcctgtgcaccacgcataaggctactggtgcagcgtcctaggggagggaaacgagaggggagaggggaaggagagaggagagagggggttgcggtcttcgggtagagcgtacgcgggaaaaacaccaaaaacaatcatccctctggacaaagctcactcgccaactcagcccttctgatcatagagcagcttcataagcgaacgatagttctggagctggctagttctatacttcagacaagaacattttgcattgtagtgcacagaatgtgtaggctatggagctacaaacaggatgatggttacctcatacgttcacgtgcggtttatagagccccacctaactagctagatacctagatcgatcttgcttggccgaaatatgtggaccagat

SEQ ID NO: 9666 - DNA, 879 bp, Zea mays
ctcgctacccgtttgacctctagactcgacctgcagattttgttaatcttactgactttggtcaatggcatgtttatgttgctataagcgctctctggattctgtggttaatccgggaacacatttgcatgccagctttcagattgcgaggatgcagttgcaaacgcgtcgtctattccctgttatagtccctctctttctctctagaggcttgagcatgttgttgcgcaccaccaccaccacgacctccgtgcaaaacctactacgtgctttttaaaaatatcgacggtcaattcattcaagacattgaccatgctattgtcaagtaattcttgcattccaaatgctgaagcatgatatctctgaatccttattggtccttcacatttctgttttcttttctggtcttttttgggtgtgtgtggctttaggtcactattattacacgtgtagatatggtccgccttggtggagctgttttgagttgcttatttattgttgtttcaacttcatttttttgtttttttttcctttgcctaataagtctaacaacaaagttggtgcttttattttttttaaagagaaagatttgattggacacgatagttttatcttactatataagaaacaaggtgtctgcacaaattatctaaagcaagaagtaaaaggaaaaattcaataacaaccaccctagccagagaaaaaagagaggctttttcatgcccagcccaataacatcaagaagctattttttttttaaaaaaaataggaaaaattctttcgtttcccaagtttaagtttaccccattccttggggcttcaaaatggccaattttccccatttttgtaatgccttagggcctttagggggacattcaa

SEQ ID NO: 9667 - DNA, 708 bp, Zea mays
cagagagacaatagcgactaggcatctgttatttttttttctcattctagcatgtcagtcctttcctatatatatatacctctactgatgagcttccatgctaaaggcacaatagagttcttatagctagcccatgattgtctcttaggtataaataatcaacaatctctataacttgctttatagttaaataatatctatatatgcaactgttctaactcctcataagtgggtgatatggtccgtcaaactcatgtgtgaacagatatgatcgaaaaggcacttctgagccattagtcaataatggtacctacgagcacatattaaatcttatatacacgtaaagatcatatgactcaaaccttggtatacacatatcttaatccttttggcacacaatacttggcgaattcaaggcaaaatttgcgttactgtacctttagaatatctcgacacttcacttgatctttgtagtagatattaggcctgggcaaaaagaaccggaaccgaggaaccgaaccgaaataaccgagaaccggaaccgaactaaccgaaccgaaggaaccgttatgaatttcggttttggttttttgagaaccgaaataaatgagattttttcggttctgcactccaaagaaaccgaaagaaaccgaaaaaactcaaaaagtatttaagatttcaattttggttaacattgtggttttggta

SEQ ID NO: 9668 - DNA, 787 bp, Zea mays
  unsure (1)..(787): unsure at all n locations
gctgcttaacaagtccataacttaaaatttaggacagcagtgatgataaacaaaaacttcatagacaactacataaaattccccacaagttttgtatacaactcatgattgaattctaacatctacttacctctaaacggtcctcaaaataaaccctgcaatctgtttttttctgatttgagcagcgacatacgcggattcaaacagcgataacttttaaaatataattccgatttgagcgcataagtacttgttggaaagataagaaaaagacctacatgattctcatactgattaacactaattacttccgaaacatccccagaaactgctaacactgctgctgtccatcactctgaaaaatctgtttttttggacagccacatacccggattcaaacatcgatatcttttaatttataactctgaattgagcgcataaatactcgttggaaaggtatgccaaagttctacatgattcccaaactgattcccattaatttcccacgaaaaatgcccagaaactgctagaacgtttgttgttcgtccaccccctaaaatactggacagcccctctaccaaatcgcatacgcaacatctaatcaattggattgcagcacaaatgaacaagagataaacacaaaaatcacctaggattctccccctttccttcctcccttcttccctccaccgaaaacaattggagacttgcaccacgcgacgtagatccgaacggcaaggaatggcaccttgggaggaggagatgggggggggggggcggctngggt

SEQ ID NO: 9669 - DNA, 770 bp, Zea mays
tcacttgcctgcttgcagctgtctcgtgaacatcctgtggaaacagggaatcattgtctaagcaacaaatgtctttttgtttccaactccaaggcagaagtactatgtatgaaaactttctattatagactataatatcacttaaggattgcaaagtccaagcaaaagttaccaaaataaattgatggtgatgattaaataaacagtttccttgacttgaaaccaggcagttaaactagaaatgaatggcacatgtgcaacatgccaaccttctaaattttccaagcattcaaaaagtgacagaacgacatgttcatacaaataaaactgaatgatgtgttcatacaaattaaactatgtcacaacagccaatgctttctaaagccaacaaatctgaggtcacttgaaataaatacaccaaagaaattcaacaaattatgaagtctttgcacatatccatatccagaagaatgaatcaagagcttgcacatttcaaaggtacaactaacactaccatgtgactaactttttaaaaaacagaagattaggtaaaccataagctgccatggtgtagtcaagtgggttagaaacccggtacggactttttcagccacatatttaatgtttttgtacatctgggaattcctgactaatgcatgaaggatacagggaaatctcatggcaatattatgtactaccaacagaaggcttttattcataaagtaaaaacaacaccaaattcttcggtaaaattgtcaaacttggtgact

SEQ ID NO: 9670 - DNA, 732 bp, Zea mays
gacctgcaggcgcccataccgtccacgttgccctggcctggcctctcactacaaattgttaacaatttcctgttcacatttttttctaaaaaaataaataagagaacaataatacaccacggtttatctggcccggcaatagcatactccacagtagtagtacacatgcatgggggcaataaacagcaacgtccctaccaaacagatgcacagattaaatgcaagaccatggattacagaaaaggcctatttccgcaaatcgggttcgaagtggacgcgcgtgtttccaaaaaaaaacgagtgttttcgcatgaaatatagttgaatatcaacttcgggttgttcgcagcttttattgaacgtgaacgttcatgcaaaaaaaatcatttatttatttatttacttgtcggtggaaacggttttattggttaccgttgcatatggacctatggtgcctttatttatagattaggggtgttttgtttctagtagtttctatattttattttattttaatctctaaattattaaatatagaaattaaaatagagttttagttttcatatttaacaattcagagactaaaataaattaaaataaaaagactaaaatttagccgttaattacacttggtgacaagactcctagaggtgggaaatgagcccgagttgcggctcgccccatctggcgagctcgaaaaagcggctcgactcgtaaattataatataaaat

SEQ ID NO: 9671 - DNA, 783 bp, Zea mays
agcttgcatgcctgcaggtacccttcaatgtatagctgaacaatggcacagggcatgttatagatttgaagcggtaacatcattcggataaaatgcggagtgagtcaaagatggcgagaacctcatcaagtccacggctatgatcaagtctgatctttctgtcaggacctccctccattatagcctgccctaagacagattttttcatcgccaacctcaacatgcgctggtggaaaccagcgacctatctacaaaaagaggggaaaatgcttcataatgttttaatgcatagaggaagtcatttcacctacacctagtctaactgcacgtgtctgtctaaaataaggaaaccaaaaaaaaaaggaaaagtggcatgaactcatcaattaaaacaggagtaataccatgccattcaaaccatttgtttccgctcctctaacaacactatctgaaatttctgtgacagcagcaaagagagcgttcgaacttgcagttttaacctacagaagacccagcattatattgacccgttggaagaaaatattgatggtatgtttcggaagctcacagttttcccgagatcaccaaggtaccgttttgttccagaaaaaccacccgacttcatgttcttgcttataaatttaaacatgccctgcctaatcccagaaattaagtaaaaacaaaccaggttcaaatcttataacacgagaaaaagaaagtcccctaattttttagatgcaaacctggataaacccgattcattcccataagccataattaacc

SEQ ID NO: 9672 - DNA, 502 bp, Zea mays
ggatcctatccagtcaacctgcaggggttgggcggttgcaggttgggcgatttggatcgctttgtagattgcgaatagttggtaagcagctgcaaatttctctcgattcttccacccactggtgaagttaggtctcattgggttggggttaggcttatgttggtcaaaatgcttggtttggactgggaatcttaacctaggtataactttattatcgttgcagtgggtatggtttttttattaagccttaattttaatagcatgctttatggctacatgcagttccaaactttagtgtcccgttggttctgaccacattgtctgcgggatctcagcaagctacacgagtttctattcttaacaaaaagaacaagcttttaagtttttacctgaaaacgttcatttgctactagctatctgagcttgtattttcttttcacactattaatttagcatgcttttaatggctagttacagttttacattttcctctctttatggt

SEQ ID NO: 9673 - DNA, 823 bp, Zea mays
gctctaacgtcgacctgcagagtggttacatacagttaaaagtgcagaaaggattctggagtccagctccaaatctgatcctgctggtgaacccacttcattggttcccttggatctggagtccatcttggtatttcctccctttatttttcctacctttttcttgctggccttgctatatggatctcctttgggatcaccagtttttattaggacctaacataattgggccacaaaaccaaaaaaggtgagttatcggttctattaaaccttggaaggaataccgcaaaagatggccaaatgaaaccaacccaatgggcaaaaagaaatgaagtgcagcgtgtgttccagaaaaaacatcttaacaaaaaatgggaaaatatctatggcacactgacagagtggttttagctcttggacactagaaatggcactatttatcaggaacacacagggaaacgttgattatcatcaaccgcacaccagagattaaaaattttcattttaggaaaaatattgtacacaaagtcttgccggaaatggagtgtgcccagataatgaacaatgtttcttaatgttttcctgataataccatttccaatgtctaagagctaaagacactctttgtcagtgtgacacagataatttcccctagagaaatagtacatggcaaatacatgtgaccaaaaagcaataaaaatcaaaaagatgaccaagatcaagccccaaatttacattattgaccggctgggacattcataaatttacctaagtggaaaaccaacacccaaaattttggatggccttggccaaattgtttccc

SEQ ID NO: 9674 - DNA, 621 bp, Zea mays
gcgggctacagctgctcctcacccaccggctggagggagcgggccaggttgacacggcggcagcggcgaggcccgaggagttggcggggccgcagtcgttgctcgcagggcgccggagcgagctctgctgggcggggtctatgcggcagagaagggacgagatgcgtgtggggagtgacgcgacgccgggtcgggaggcgcgggcgtggtcgcctacttttttgggcgggtgtcaaaactcagtgggcgtgggcgttcgtttttttttaaaaaaaaaacttttttcgagacattgggcgggggtcggttgctggggacggaggaagagaagaaagtctggatgttggacgaaaactacctctagtagataggaatgggtagggctgggtaaaaaatccgaaacccgaactcgtaatattcgaatccgaacctaaaatacccgaacccgaattttgtttagggatttcgggtagcaacttgtaaaacccgaatttagttcgggtaattcgggtatcacaatcgggtatccgaaatacccgaattaccgaaactttcatatgtcatgtactcatgttatggttaatttttaatttatacatttataattatgtgtatgtgtgc

SEQ ID NO: 9675 - DNA, 823 bp, Zea mays
ctgccgcttgcagtctcttcacgatctcgtacttgtgttctgtgcaacaaacaatcccataagcaaaaggttctttatgtagcgacaagagtacttataggtgtttgactcaccagggaagactccggcaaaaccatcggccttctcaatgagctcatctacaggaagcgcttcaagcgtagcatccttgttttggccgagcagcgcagaggatggatacatgttggtacccatgccaagcctccttccagtctccttaccaatagcaagctgatcacctgaaataaaaaagataaagaagtccatgtttagcaattgcacaaatactggacctattaactggatgggcaagtggtaagtaccaggctacgaccccgggatcatcttgacgttaacaccaagaacaagagccttgcgaattgtctcagcgctgtcatgcctaggcggatcaaacaggggcaacagaccaacgaactgccatggtccacccaggggactccttgttattctcagggacttcctgtggtaagaacacatttggaatgagaaaaatggctcaccgatcactaaaccccgacacccggaaaaataacctttaacccccatacccggttggcatcaacaagcgaaccaaaaaccaccccttggcataactttgccaataataaaggggcaccttcccgcctcagaaccttcctttgagtgggcccagggcaaaaaattcttttggggtttcaataacacggggcaattaatttagtcacgctgaaaaaaacatattttttttcttttttcaattcagggattagcaacaagatcgcaa

SEQ ID NO: 9676 - DNA, 736 bp, Zea mays
ccgggcatcctttagagttcgacctgcacatcactatctgttatttgattttcctggtcaagtggaattgttcttccttcactcaaatgccagaagtgttattaataaactcatcaaaaagatggacttgagggtagagtgtgctctttgtcctatttatatcattctaatgctaatgaactagattgttcaatgttttttcctgtattctacagcttactgctgttcaccttattgatgcccattaatgcctgggatcctgaaaagtatgccagggctttgcttctttcactatcaacgatgctacacttggaattgccacatatcaatgtcttgtcaaagattgacctcattgagaactatggaaatttaggtatttggaaccttccatcttcctgtcatttgagcatttattgttgttcatggaattggatgttcacaccatattctattgatcaatactcctatgtatttactgtagtatctattcatcttcttgattggcagcattcaaccttgacttctacactgatgtccaagatctttcttatttgcaatatcatcttgagcaggatccccgctcagccaagtacaggtgaatttctgaacacaatcgttacagcaacagctaggagtatgtgtactttgctcaaaaatttgaaccttgatgaaatttaccttgaaatttgctaaattatggtttccaaatttcactttggccccaaatttcttgaaa

SEQ ID NO: 9677 - DNA, 729 bp, Zea mays
cttcctggctcacaccctctgcatcagagatgattagaagggctttcattgctttttttatggctctggcacctaggtcttgcatattgaactccacccccacacgaacaacccggcaacttcttcttggcacaaacccatccaatgatgatgaaggggcttaggggcaacacatctactgctgtttggagctgccagtaaacatgctggctgtctttttattttttgaagaattcttcctttcttgattcttcaggtctggcagcgtctgcttcaagcatcttatctggtccaggtcgttcagaattgatcacagaccccataatcctctctaaaaggtgagtggtttcctgatttgcgatgtgaaaaactgattgatcttgttaagtgtcttgaatttgctgtgtaacatggatgacaggaatctggaaaaatatggggtaggaggtgattccaaattgaactagagaaatatgtagactttcaggaatttattctgctccccgtttggttgagattaccatatttttggcagcgaaatctggtttagaaagctgacccaaacacaccttcaatatctcactgatttttatttaaataaatttttttccacaagaactgcttttggatcctcggacatggaagaactctcagtaggagacagaccaatagagaccgcaatagatgaaagcgttaatgtatcttcccaatcacatttctttcaagcca

SEQ ID NO: 9678 - DNA, 863 bp, Zea mays
gcagtacctcgttgaggttgccgagatggccgatcctgaagaccttcccggcgaccttgatgaggccgaggccgaggctgaggttgtaccgcttccacgcgtgcctgacgacctcggcgctgtcgatgttgggcggcacgacgacggcggtgacggtgtcgctgaaccactcctccttctgttattagttgctgagcccccacgcctcgacggcgagccttggtggctgtcccaaggcggttgtgcctcctcacgacgttgtccagcccttcctcgaagatgaggtcgagcgcggtgcggaggccgtagaggagctggatggagggcgtgtagggccagtacgtgcccatgtcgtagaacctgaggtagtccttccagtcgaagaagacgcgcacggacctggccgtcttgctggcctccagcgccctggggctggcgcacacgatgcccatccccgtcggcatcgacagcgccttctgcgagcccgtgagcgccacgtccacgccccactcgtccatgcggaagtccagcgcgcagatggacgacacgccgtccaccagcagcagcgccgggtgcgcgtgcttgtccagcagcgcgcgcactgcggccaggtcgttggtgacgcccgtggccgtctcggtgtgcacgatggccacggccttgatggcgtgcccgcggcgcgtcctcgcggagcctgcgctccaacgcgggccaggtcggcggcccttggccccacttcggttttccaccggcgtccacgtttgaaaacccaaggcgcccggtggttgggtcgaatccaccagcagggcttgaacttggccccgatgaaggaaaggacaccgaacccttgttcgccccggggg

SEQ ID NO: 9679 - DNA, 771 bp, Zea mays
tgcagttttattggcaacaacactgacagtttcattcaccttctggtcatagcccccatccctcatctgtattcgcagacaagcaccatcatcagacagaaaaaaaacagtaatgaaaaacatatggattacaaaatttctaacataaaatatgctttgatgtagtctaataccacctatgattatggatcttggagcaaggacatgtgataaagttagttcaatgaagttcatgttacaaacctaagaatggatattttgtgttgatagaaaattattgcttacagataaaatgcagcattcctaaaatgtaatacaaaaaactttcctgagcatgggcttgtctcaaagtgtagttttggttgcattaacattcaaacaagaagtgtttgagaacaacggaataaaaaaaggagctatatgagctcggtgaaccccaaagaggggttcaaactccatagccaacgcataactagacccgggaatcaattgttgtgcaggagaataggtaaataagtattactgtatcagtcacctttgattggatttcttttgtgccgacttggacaacactggcagcagactgggcagcagaggctgcaactaatgaaaggcgtccaaatccctgaaaaaatgttatggtaagcaactatatcaaaccaatatacaattgcataacaagatataatgctgggactcactacaccctaactaaaatatttcacgtggcccaaaagtaaagcttgaagggcaaataaatggcattcaaac

SEQ ID NO: 9680 - DNA, 720 bp, Zea mays
agcagcacgttccccttcatcacgatctgctgctgctcgaagttcctctcggcctgccatcggaccgtgtcgtgcgccatcggagccagccacgccagcgtcttctccagcgcctcccgccagtcgtgcgccaggaacgcgtcgtagatcgccacgctcttcgcgtgcgtcttcaggctcctccgcagcgccgccttcaggctcgacggcagcatctggtacaggtcgtcccgcgcctcctcgccgacgaggtgcgggtaccggagcagcttctcgatgatgatgacgacgttcgcgtagtgcagcgcgagagcggagccgccgactgtggacggcggcgccagtgatgtcaccgtgctcttgggcccgaaccgcgccgcctttctggtaatcctgccactcttggatggtggggttgtcgtcatcgtcgtcgttgtcgacagcccctgctcgctgctgaatggcaccagcatccctgatctgatcgtgctgatgcggctggaatcttccaggaactcgtcctcgaacccatcgttccatgacgcccaactgctcaagctaagcactccattgagcattttcccgggcttcgctcacaggcttgccgaaaaatcacttgccgcgacatgttcggatcgactctggaaaccggccctgagttgccgcaatcactgagatcgcttccgacggggcctgagtttgctggtatttggaaccgga

SEQ ID NO: 9681 - DNA, 814 bp, Zea mays
tgcgtgcctgcagaatgccgaatgcatgcagacgcagctcctatcatatggaacatctcgttgtcatcgaacctgtttcccatactgcggtcaggaaggtccgcaaacttccgaagctcgattgccttcatcagaagaggacgagcctgacaatactacagcatgtatcaggttctgagttaagatcataacagccgatagcctgtccatgtccaaatgctaagctcacacaacgaaaaatagaaacacacacaaatgagccaaatatagcacccacggtatctgttacaacctatctcattgattggatatggcattcatattcttcattgtaaaagacagaaactttctaactatatcaaacaactacggattagcatcactagtgctcacgtcagagttaagcttgaggccttgttgagctagtagagtagcggtgatccttggacatgccacatcggggaaaattcttgtgtttccccttgtggtttgcatatctacacttgtgctctttaagaatgtgtccagatcaatttagggcctgttcgtttactccagaacggttccattgcaaccactccggttggaatgataagtttatttgtactagtattgattagttgggatagttcctggccacaatccgacctaacccaaccgggccttaggtgtcatttgggtaatgtgcccacttcctttcatggatttgcaacaggttataacctggtggtttttgcctttgggtcccttgcattcaaggcttgcttggagttcattggctattgttcccccatcctggaagccttctttccat

SEQ ID NO: 9682 - DNA, 761 bp, Zea mays
aagtgaagcatcactggattggcagacaagggttaagattgcagctggagcagctcgagggattggttacctccatgaagattgtaatatttttactaaattatttcttcagtgaccccctaatgttggatagttctcttagtatttcttatttttgttcattaggtcatccacgtattattcatagagatattaaatcatccaatattttgttggataacaacttcgaagctcaggtatgatgtgatttgctatacaagtctagaggtcaatattttggtatgctattctgaccataattattgtctaaatttgttgtgttctatggaaactatccaggtttctgattttggacttgcaaggttagctgccgattccaatacacatgttaccacacgtgtcatggggacatttgggtaagtaatgaagcaaatccacactatcttgcaattttcagagtttattggttattctatgcccagtatctagtttagtttacagaactaatatgatatatatcctctccaggtatttggctccagagtatgcattgtcaggcaagttaacagcaaagtctgatgtatattcttttgggggtgttcttttggagcttattacaagaaggaaaaccctgtggatgccttctcaaccttttggaagaagaaaagtcttgtttgaaatgggacgagactccattctattataccaagcttgggaccctacaccgccagtataataatatagctcaggttccttcaaac

SEQ ID NO: 9683 - DNA, 1429 bp, Zea mays
ctctaatccttaaactcaatgcggatcttagggggaggcgtaggtttcattttgagaatttttggcctaaactccccggttttttggaggaggttgctgcttcctgggatcaacaggttcagtcttcttgccctctggagagggtgtcattgaagcttaaaagattggcgcggaggttgcagtcctggggtcatagtgcggttggaaatgtcaattctcagctgggactggctcgtgaggtgctgcacaggttggagatggcgcaggacagcaggccgttatcctcagatgagctatggttgctgcataaattgaaacaacactgccttgtccttgcttctttggaaaggacagttgcacgcttgcattcccggttgcactacttgagagatggagatgccagcacaaaaaaaaattcacctacaggctcgcctccgcaagaagagaatttttatttcccatttggagaatgaggggaggagcagtcgccagccatgaacaaatgcagggggttctggatgatttcttctccaatcttttgggttctaatatccagagatcgtattctcttaatctggttgcttgccacagagacgctattgacttgagttcccttgaggctcctttctcagagaaggaggttcgcgacactattggtgctctcccatctgataaggctcctggtcctgatgggttcactgaaaaattttacaaatgttgttggcatattattaagtcagatttgttggcagccataaattcactccatcagggaaatactcacaagttggggatgctgaattcagcttatttagctcttctccctaataaagttgatgccttatctgcaagagattttagaccaattagcttaattcatagttttgctaagttggtcacccaaaatgcttgctaatagattgggaccctatctacaggagttggtggcatctaatcagagtgcctttgtgagaggccgatcgattcatgaatactttatgttggtgcaacattcaattaaatctctccacaagaagaaagtctctagtttggtcttgaagttggatatctccaaagcttttgactcggtttcttgggccttcttgattgaagtgctttcatatcttgggtttggtcatgtgtggcgaaatatgatctccaatattctggcctcttcttctacgcaagtgcttttgaatgggtctcctggtattcctattaggcaccggagagggcttcgccagggagatcctctctctccaatgttgttcgtattggttatggatgttctcaatagtctgtttaatctggctgaaagtagggggctgctgcacagcttggagggtgctaatatccgtaacagactgtccatttatgctgatgatgtggtcctttttgttcaaccttttgaagaagattttcaatgtgt

SEQ ID NO: 9684 - DNA, 908 bp, Zea mays
cccggggtacctgtagagacgacctgcagtgtcttaatcattcgatgggcaggtaatttctcgcgagcgcattcagcacagcaggttactattggctgctcgtccacttaagcaggttgagctatccatttggttcgacacagtgaagaactgaagatacgcattgtgcttgcttgtcttgcggggctcacaaacatcctgctggtgtgctgtgctgggaaggtcacataatccacttggctatatgccgtggtgggaatgtgaatcggggcttgattagtgcaggcagcaggcttgttaacttggtaattagtcaatgaaacccatactctttaatgacttcttttggccactgttagcctgtgtttgatataatgtagctggtcatttgtgcttccttccaaaagttccatattttgttctttattggagcatcaattttagatggcaatgtatacctgaacatcttcaaactgtttacacaatatgtctgcattgtttttgtgcttatgccagtagaattaacaattaacaagtagtatctgttcattactttagttcatgttttgtgccccatgaaattggtaatggaattgcaaattggagttagacatcattgctttgaaatgcacaaactggcccaattaaagccgtgacattccaactgagtgaaaaccggctttttcatgcctatacctctcagtaaatcattcattaaatttaatctggaggggagttttattgggtccttattggaaagcctggcccaattattcttatggttttattttctggcccaaattacaatggaatatatttgtgcaccgccccttgctacttttttttctccaccaattcttaggcggtgtgaaatattatttacagaaaaaacccattctttgatatgg

SEQ ID NO: 9685 - DNA, 604 bp, Zea mays
aaggccaacgccttcgtcatctacatgctcggcgaattcgtcaaagcttgtgaggccaagcaggtgaaagaaactgaactttttttttatcaggctttgccgatctcttgttcctctgtttgttgaactcagttcaggtgatgccagagccagacttaggttctaagtacagtagcatcttttttctgtatttttttttttttggagtgtgttccatttgtttcggtgcgggagcttggaagccaagcttgtgcataattgctagttggtgttcttttctgtcaggttttgtcacatctttgtagctgctaccccagttaggtgaagtagagcttttggatcatgaaatgatatgatggggccatgctctgagtctgtcctttttttgctgtcatgctctctcgtctactactgctcgctttctttcaccggttggtagtcttgtagcagtattgggaacaatgtagtatggttaggagtgacaatcatgttaattgagtaagttggattcggagacaggcctgtaactttcttacctttttagattaatttggaggccaaggtgatatgcagctcaaacattgggagagccctgacccaagaa

SEQ ID NO: 9686 - DNA, 830 bp, Zea mays
gcttgcagtatctgatttagtatgtgaaattatttttcttcctttcaattagttaaacatatattgatatttagtgtaaactcaaacaaaagcaaattcgataacagtacacataaatgcttcaaagctcaacacattatcgacgattctgcatttgaaactcaagatttgattctgacacgttttttctaatcaggaagtagaatactctgaagaacctggaaatttgtacttcatcaagtaccgtgttgctggcggaaccaggtatttttcactataccttgcattaagacatttcattatttggttgtcattggacatttcattgttgagttcgtttcccaccagattcttgtttcattatatttgaattttcattttctggagaatgactttgcacgatgtacaatttaactttttatcttataatatgagaaatcgagcaacatgattggcaccctatattgatgaaaattgcttagaaatatttggtttatacttggcacagggatgattttatgactatcgcacccacaagagctgaaacaatatttggtgatgttgcaattgctgctaatccagaggtatgagttctccagagttctacagtaatgtcttcttacattctgttagaactatgtcaagttatttattttttaaacagctagtttattagaaaacccttttgactaatatgtcaatttggcccatacgaggataaagcgttattgcaccaatatggttgggccaaatttggcctaattggtacccgttggaccatgttggggaaaacattggccccccaattaattggctggatccgggggtaa

SEQ ID NO: 9687 - DNA, 509 bp, Zea mays
aacaaacgaccccttttgcaatcagatttgctaaagacgtacttatgctgatataatgccgctatgaatatgttgaattgatatcttgttagcatattttctataatcctatttgtgcctatttctataagcctacacacgttacattatcagtatacagccaaattctcacatgtatatacttttacttatcaactattttctgtttattttatatttacaaacttacaatatgagctttatattaactcatatataatatttatatagaaactaaaaatctgcaattgaacttgataccgcacccgtaaggcgcgcgacatccactggtattgttaagtttttgctgatcgaggcgagctggcgttgtgatgatgatgagcaggatgggacgccaggaaggggacggggttagatgacgtcgcgcattgggaaggggcggcgtcgggaatggggtaccatggcgaactagctcggatgacgtcaaaaaattagagccggataggtag

SEQ ID NO: 9688 - DNA, 841 bp, Zea mays
gcatgcctcgcagatgtggaacttcctattgcctgtatcatactggtttgcctgtttgcactgcaacactatggtacacaccgggttggcttcatttttgctccagtagtggtcacatggctcctatgtataagcgtgattggtgtttacaatattattcactgggaacccactgtatatcgagcattatctccgtattacatgtacaagttcttgaggaagacacagagaggaggttggatgtccctgggaggaatactgttatgcgtaactggtactgtgctcagcaaaccatttatgaaccttttcccttgatctttggagtgtctcttactacaaggtgaccctttcgatctttcaggttctgaagcaatgtttgccgatctagggcattttaaccagttgtcaatacaggtgaagaaatgtctgctgtgaactattttttctgtattccatcctaggagtatatggagatgtattctctgataaaaatttcttgggcagattgcttttacatgcatggtgtatccagcattgatccttgcatacatgggacaagctgcttatctgtgtaagcatcataccatggaaagtgactataggattggattctatgtgtctgtgccaggcaagttattctcgtcagttgttatcatcagtgatgtgaacaatagcatgatataagactcagtgctgattgttaatgtttacaatttaccatttcagagaaaattaggtggcccgttatggcaattgctattcttgcagcagttgtgggaagccaagcttgcatcactggtacattttcaatgataaagcagtgcacttttctgggctgctt

SEQ ID NO: 9689 - DNA, 689 bp, Zea mays
ggtctcttcgacgagcttagccttatcgtcttcctgtaccagccacccaaatacatacacgacacagtctttaattaggatacagtctttacaaaccacacatctttcttcctacctttttctttattgctttctttctttcttttctaagaactcatttaacaaccgcataataattaaggaatgccagcgagcttcatcaggaagctgctggatataatatggagaacagctaagaagggcgaccacaccacaccacaccatcagtgtatgcagatggctggttgcattcttgcatgaaagctacaatgcactcaccgtggggtatggccacttggagtgctcctgccaccattgcttgaggatgctggtggtgtccccaggcagcttcccggccctccttttcctcaggatctcctcccgcacatcctctattctcgacttgaaaccctgcaaaccaaattccgacaaagacttcacatcaacctacagcatgcattaattgcacgtcttcttctccctagtctcttttttaacctgcttgagctccatcttgagctcctgcctgaccctctccatgagcgagcgctccgagtcggtgggcatgagcgggccgaagcccatcatgtcgtgcccgtcggagcccatatccaggcccacctccagcatcggcgcctcgtcctcgtcct

SEQ ID NO: 9690 - DNA, 505 bp, Zea mays
tgcagctggtgggtgcctgcttttacatgcacccccgcaccgacgggcgaccgggggtgctgatcaaaaatgtacacgcctttcagcctgtgaggcaggcaggcagagagagagagagagagagagagagagagagagagatattcacacacgcacgcacgcacccgctgattctgattgggggtggggagctagggacgatgaggttatatattaggcgtggatggacgtgggctggatgatgatggagtccaggtcggacgtcgtcgacctcaccacgctcacggccggcaccggcagcttgtcggaggagcgttcagcggcctcgccccagatctccgggatggcccgccggagcgcgccgatgctctccaccgcgtagtccgcttccttgctcctcgccctcttgccaacctggtgtgcgggaaacagcagagagattgacgaatggatcaacgcatgcactgctagctgtatgatggttgttagttaataactgtgtgtt

SEQ ID NO: 9691 - DNA, 681 bp, Zea mays
gcagtgatcctgttgacaggcttgctccaagacctgttttggccaggtattgtgaaactgatggctttcagaattgtcctttatggcttgtgtataacactccttgactggatatacttttgcaattccagactttctgtaactattttgagcttaaacttttgttatcagtccatccatgaattactcatgctaatcattatgtcccttgatttctagaatggaagtgacatttaatctcagtagccatgctcttgtaggacaccagacgaagtaattgcagccaaaggtgtgaagccaacattatcaccaaatctcaatacacttgccttagtcgaggtaagtcgctccttttaactctatacttcccatgcccccttattcttgatgcaagctatggtgccatgcctcctttccctttcttataacatatagaagtaataatgggtcatatcagcagatctctgagagtcagagagaatcagctgtcctaatattaatttagggttaattgatccagatattcgttcccatttcccaattcaagagaattagaagtagttcaattatatttgaatttgttgcttggcaagaccgcaaatgtaattctattagcctattaaatctggagtagccccacattctagtgggttccaaagcctattccaatcatacctccac

SEQ ID NO: 9692 - DNA, 741 bp, Zea mays
aagtgctttgaccctctggcagtttttggaaggcctggctggttggctttattaaccattgcaaaacccctcaccaaagtttggttttttttaagcccgactttatttgggatttttggcagccttcttagggagttggttattaataaccaatttatggcccaaggacccaaattagaaattaaaaggcaccatgttttttgtaagttacacggcctttgagcatagaaactataaatgcagggtcaatcgtaacatggcagtgggtaaaaataaatggctaataaaattgattaatgatatagatatatgagtgtggcagagatttgaaccttgtcgccttcagtattgtgtggcctgtcatagaatcacgtatatgccaatccctacgcattccatttttaccattagcactaacccatgtatttacttcaacagtatcacccctacagcagaatagaggagcaacttagaacgcataacagtagaacccagatgatgagggatcaacattcagttcaaagaaggtaaatgttctagtatatgttagttaacataggaaatgtatcaagacttcaagaggttcaatgagtgtatctgtgtcaataatagatgtctacaaactgcccagtgacatacaactatataggctccttatgctaaaaaaacttatattgggctccttccaaccaggttaattgtcaaacaagtcaaaaaaaagcactgggggaactttccttt

SEQ ID NO: 9693 - DNA, 750 bp, Zea mays
tgcagcccccttgaaagatggcgcctttctgaggctccccgggggtttctcgtcgtttcttgcttggcccctaaagcgggagagcggtttccagggagctcctcccgttcccggccaattcagctgaagtggcggcaagtgggtttagggctcgatccggttttgtgcccgggcgtgtctgactctgacccgggctagggagcggtggttcttggctagttcttgagctggttgcggcgcttatccctcttcttggagctcttggattggtttgggggaaagcaggttcttgcaagcagctgcttcggttctcgaggatgttaattttttgaattcagtcggggggaatggggctctcgcggtctctggattgagcatttctttattggaattcgacatttcgtgcggcctccagtccatggaggatttggggctgtggaagcaggcgtggatgtggggtgttgtcccagaagcacatcctagcgtgggcgcacacggcggcgtgcggcagcagggagcgcctcgccttcctggtcgatcggcactgggcccgccgtgtcccgggcctgcgccacctcctcgcgactcgcgctcgccgcgctgcggcaatggcccgggtgcacggcgcgccgggtgctggccggagcaagcctcggccctgccgccgtcttcgtaatcctctggagcttcttcgtgtgcatgaccctgccggcgtgcgcctttacgcgcttcttaacctggttcgggctc

SEQ ID NO: 9694 - DNA, 734 bp, Zea mays
cctgaaacattgagctattaaaaattagaaaacgacacaccttcagatactttctgattctaaatctaaatatgaaacctcttggtccttacttgcaagtaaaagctacatattatacaagtaatttgatgacaatgagctatgcagtcagcatggaaatgtcaaaacctatctgtgagaaaatatcatgtgttctagcattaggattcttttgttttatttttctactgattgaattcatgcatgacttacctagtgcaatctagatgaaaaggtctaacattttccccatcttaattaagcctgctacaattcacaactggggagatagaaactcaaactatggcagaggcataagtgtgtattagagtcaatccatctacaatgaaaagtatgctatattcataggtattggcatttcaattaatcagacaaacagtagttactgcacgataaaacaactgaacatcaactttctagcattttgctgagataggacccccgcagggtacatattacaagacaggatatgaaggatggagtagcatagcattattctagcataattatattaacataacatgattaggtcaggtcatactcatccggaagttgtgtttcgtcaccatagtaactttggcagcaaaacaaactagacagaactaagtagtgaaaaaagaagcacagatcgcagagagcagttcacatattttactactaccaagtagcaaaga

SEQ ID NO: 9695 - DNA, 769 bp, Zea mays
ctttggaccagaacgcgatgggagaaaagatatttatcactaagggaggaaaaattcaatagaaaatatttttttaaaatccctaggtctgttattaagttgagctttatgcatgctgagtgggacacaaaatagcagagtacagtagccctagctgtggttggccaatcctgacacattatcctctccacctcttcagaatccggacctcggcagagtccagtactccagtcccttgtgcatctcggcctctccactctcctttccacgcccgtccagtcctctaatctgacccctcttctccagccggccggagatggtctcgctgcgatgcacaaccgcgcaccactccctcctcggctcgccgacctgcctcgcgcgcccgcggcggcgggcgtgccccgtcgtgcgcgctgccgtcgccgtggaggccggcgcgcaggccaaggtctcactcatccgaattgggacgcgtgggaggtgatcaaattccaccctttctgcggtttctttggttgggatggcgatgaatgtgtggttttgttgctcaaaatcgtgtctttaggttttgttagcagttgcatttggggacggcggctatgcgttgcgagcgcctgagagatcctgtgtttagctctaccgccgggaatgtgagttttgagatgtggctctgaacctattgcgtctttataactaggtgttggaaaattggggataatttggtgaaaatttaaaggaaaggagtgttgagaatctttagcaggaaggg

SEQ ID NO: 9696 - DNA, 703 bp, Zea mays
aagctcctgttgtgtttgcgaaggcatgccagggattcattttaaaacttgccttggaggcatgggttccccacaaaggaaaccagcgtccgaccctggcaaaaaaccaccttggaactggccttaaccagaactgatttatatgacttcctgggggccataatcccgagggatgaaatgaaagaggaggggctcggacataatcccatagttggcctgccgcctgctatgggggctccagctgatcatggttctcatccatattactatgtgccagctcagcaggtgcaaggagcaggtatgatgtatggtggccagcagggtcacccagtgacttatatgtggcagacgccgcaagggcaagcggcagagccccccgaagaggagcagcagcagtctgcctgaatgtagcaaatagacgataacagcaaagcaattacatcttgatctgaagttctgaacttagttctctaaacaaacaaatatgatttggttatgttaattgtgcagatgattgcaggctgaaacaattgtcgctaattaggtgtcatagcctcatagggtttcctaatggtagtttcgactcccgacgctgccacggcagcagtagaaaatgattgtaatttgcagactaatgtagtaagaatagcctttttctgtctaatccaatatccgattgaggccctcgtatgaactgagtgtt

SEQ ID NO: 9697 - DNA, 790 bp, Zea mays
ctgccgcttgcagttcaccaccaataagagtctctgatattgtaaacatactgaagacccgaatatcccacatacacttacccttaaaaggtagtctttttcttgggtgacttttttctggccccttttttgctttgatggaagtggcctttcccgggggtttcttaaaccttttaaggcctggtccggtttttccaattcctgggggcctggttggaatgggaagagactattttaaaatttggattggctaaaaattaaaattaactcattcctcctagtccacatggattagcatcaaatcgaacaaggccgaacgcggatgcacggccagaattgagctggtgaaaaaaaatggaagtgaccccattttttcagttaaaatctcaacttttctgattgaccaacatctgagtgctctaactgcgttattgctgtacagaaacgtaatcatatgcatttacccacgctgtttaccaggtcctatgcggttcagaactttgcaccgtgtttttccttcccatctgaattacccattgaggtttcttttgtatttgaaagatagttactaaactttgggtgcgtcttttattcttctccatcgcaacacaatgacttgcagattcgttgaagcggaaggtagcaacacatacaacacggagaagcttcggaagctagggtggacctctaggccccatggaggacacccctccgagacaagcatcgaatgctacagaagctatggggcattcctgaacctgagcctttccctttcaacttttggggcttt

SEQ ID NO: 9698 - DNA, 705 bp, Zea mays
aaattcatcattatttattcatttaactgttagaatatttctctcatgattttgaagggcgtttaaaactttggtaaaagtattcgaatgtgatagaccaggaagctgcaattattattcctgctggcaaagtcaaagatcatctcagcaagccaaataattagtagtaagacacataactattgcagactcgagaacacttttttcagctcattaaagaaaaggcaaatcaagagtagttaaaccggcgacagatttagattcttttgaagatttatggcacaaactttagtgggtaaaggaaaagctacaaagaaagaaatggaccgcatgctgatctttgtagtggaataggacgcgcttcacgtcctcgatatgaatatcaggtacaaagtcaaccataagatttcctgtgtagagagaaatgaggaaagtggatactgttgagcatacggaaagtcaaccatcagatttcttcttctcaattttaatgtatatttggtcatagacatagaaagaaactgaaaaggaacatatcagatgaagaggtaaaacagtaacgcttggatcaccagagaaacgagaagacaacaggatatgcaacatgtttgtactcagcaagggggccataaaagggtagccggaaagtacccatacccaaacattttgggatttatgagggacaaaaccaccaaacatttttta

SEQ ID NO: 9699 - DNA, 496 bp, Zea mays
ggcaaaactgtgtctagtgcatctgttgctcaagacgggaagtttgttctcaaggtggagaagcgtactgccgatcttgttgattatatcaacgctaattacatcttggttgctacaggtagcagccaacatgtacgtaaattcttttttgcccctctcgttgcaaattcatatcttttcaccatatcatagggcaaaatggtacgcagttaacgtcttgcttacctgtagggctattcaatcgctgcacaactcggtcattccattattgcaccagttcccagcttgttcacatttaaaatcgcagacaagcggctggctgatctcgccggggtatgcatccacataaactgtttcaaatcccatgctaagaaataagaattactctatccagtaatagaatagtgatcatttataagtcgtgcagccaaattacatgagtttcctctgtttacctgcctactagtatccataatttaattgctactgaggagga

SEQ ID NO: 9700 - DNA, 774 bp, Zea mays
cccgtttatcctttagagtcgacctgcccctattttgctgagggattattcattatttggatagaaatcgtgtaggaatttaatattttgctgagggatcatttggatagatagaaatcgtgtaggaatttaataggaatcagttcgattaatagcgcagattttccacgtttcaagcaggccatcaaagaaaattaagcatgtttggtttgctgtctaacttatcacactttgcttaacttttctgattaaggttagttttttaatttgaacgactaaccttagacaaagtatggtacagttaaccacgaatcaaacaggtccttcatccttgcaaaagaaaatataatttccgtaggcgtcggtcatttcgactgatttgttgttgccgacgtttcgtcccatgataaaggaaaggcacgagttgaccactagaatagtagagaagtagttcagtttagtagtagttttgattatgacgaaatgtttcgctattttttttacgagtgttagttagcgctgggcctgggaaagagaagaaaagggaagggccccatctacgcccgccctcgtgtacctggagccgtaggcttccgccagcgcccagcatgaggtctcgctgtttccttcacgatacgcccccccaaagcggatcaaaccctaaatctcgtcttgtcggccccgttcctccgatcccatcctatccgatcctcatggattccttctcggtcagcctcagccagcaacccgaggtcgactacctttttaagctac

SEQ ID NO: 9701 - DNA, 752 bp, Zea mays
cttgctgcttgcagggtccactgccaaaacatctcaaacattaatcagcgtgagttatatagctttgttagtgaacagccttttttattcttacatgctaacggttgatatgactcgctcatctgaattcgttctgtacatcttttttttcctgaactgaagtagaaaagactatggaaggtcctgactgtagagttttctctcatattgtgatttttgggctaattctatgtattctgctgttattcttggatttcttattgaagtatgagctctagagaacataactgttcaattttaatgataatttcatactctttaattagtttggtattgattttttcttttccttgtgccagtgagctcatgcgaaaatggacttaaagatcatataaagaaaggtacttgatctttgtatcttacatgagtttgtttgtctttatcctgttcaatattcacaagcacttttttagtgttaagaccatgctgcacttgtgcaaactctatagactgcttgagtggccagatacggtcagattggcgcggcaaacgtttgcttgtggactgtggtccaaagggatttattcttatgttggacatagaagcgttaaccaatgcaatttttgtccttggttcatattttttacactcggaactatgggtttaataatatccaccctttttttaaccatgttttggtgaaaatattcgggtcctatttgaccctggggtctttttttaattgttctcct

SEQ ID NO: 9702 - DNA, 812 bp, Zea mays
tcgacctgcagtcttgggacaggatttccatagcttggcgattcgattttctggtattgggttggccttcttcgcttcgaaggtgaccagctggttaattttcccgtgacaggaaaaatggggtagagacctccctgacagtaccatagattctggtaatggacattgtgtttactgttatctgtagtgggtcgccaccagtttcctccatgaggactaggaggttctctccagtcttcagaaaatatcgaggtatatgataccttagaaaagagagccagacaatacattttacattggtctgtcatgattgtacaaaaagaatttgctttgcactagaactagtttgagtactgacatggattgagaagattgcccactgggggttttgaaggagacccagtaccgtccaatgctctgtccattaatccacacttcaccctttcccatactagttaggttcaatgtcacaggatcatttccccatggtgcgtcaaatgttgtctgttaaacaacagtaattttcccaagctgttaatccaaacactaagagtaaatatatgcaagtcaagtacatcagcacaggtttacgtcttgtataccttataccagataagtggcagatgtatggatttgctaaatgcagtccattctgcatgagatgatccttcagatgtgtagattttatttgtttctccatattaaaccaaccctttacattggcacaccttgaaaaggggagccttgtgatgttgaatccaatcaatttcaataattaaacggttgggaattgggattggatttaactttgg

SEQ ID NO: 9703 - DNA, 784 bp, Zea mays
agaagtgcaactttagaactattactaagcctgaatcaaatgccagaagaattacagtaataccatcaggcctaccttgcatattgggatctaaaccttgaaacctcttccttgaaattggaaaacctactggagcctcaatgatcaatcgcaaggatttattatttatgaccctggttagggtaattttattccatggggaaaaaggaatgggccttcctttaaggttaaagttacctgggctctattattggaaattaataatctaattagtggaaaggccaggtctggtgcaggggggtaagctgtctcacttgagtccccttttgttagctcccacacatgtgggagcctccgacactgtgtctgctcttttgttttgttttttttttattctagggcacgagataatacacaatgcaatactgccaaattctacaacatcaatactttcggtgtccaagtatatcatacaaaagaatatgatcatttctttgataagactcagcagcatgtcttaaaggtacatagaatagattaacttttaagtgttatttacaatgtttttcgccccacttctagctccagtttctcttgctaaaagctaaagagagaccaaacagctggctcctattgatttttaaggaacctgaggctgacaccaaaaaagccaatagtttttccttcctagcttttgtctaacctttccactattgcccacacaccaaccttctggatttctttcacaaaacagtttggagtgccttctaataataagctagca

SEQ ID NO: 9704 - DNA, 772 bp, Zea mays
tgcctgcaggtctggacttggacttcgtaatcctgagaacaacgaaaaagtaaggccatgttaacttaatgtgtcaacaattaattcaggagtaatcttagaagagctgcatagtacctttgtagctggaaacgacatgagccccatcgagaatgcgaacttgtgagtcaccagatgtcaccatcagtttctttggatcagatgggcaatactgttcatgcaagaaataaaaaaaaggctataagaatcggtggccataaagatactccgaaatcctgaataagaaatttgagtttataagagtcgacaaggtcaatagatctatacctggaatccaactattcttttaagtggagatttctttctgccatacagggggacttgtgactccagtgctagatggttttctgaataatccgatagacaatgaattagaaatttgatatgcataggctttgataagcatcatatttcagccaactaaacaaatcagctaagttagttatgattctcatagtgcacacaaaaaaaagaacagtttaaccttggctatgatttatgactattaaggggccttaaatagtattgccttgcatttaattttatccaaaaatatcatacgaacttttcactaatgagttgcacattcatatttctggcattgatacagggatatcaaatttctaaataaacaggttttaccaattttatcgtagctgttatatctggaacatttaaaaaaaaatgccctcagcgctaatattttttccag

SEQ ID NO: 9705 - DNA, 767 bp, Zea mays
aggattgaagagattaaatatctttctatccaattttgaataagaaaaaatataatacttacgatacttactcaatagtacccttaaccgaatagccaacaatcagatgacctgttattacttatcactcagacgatgctattttaacatttgaaggcatatcctttcaggttacacacaactgacttacgcacagcctatgcacaaagtcttgttttggctatagctaaggagcatacttattaccatgggtatgctgcgaatgaaaaacatgatcctaaaatcatactcaggtgagaactgatcatggcagagaaaggagactctgcatcacctgatattcagatgtcactgtacagaagctcgttgcaactcaattggaatgaccccacccagaattgctcattgagaggaagccgcggtaaacctcagacaacaacttcacgttccttatttatggagatcattattttcatgacatggagcatttggaaaaactcgaacgaacggatgattcaaaataaagacccctgtggttatcactgtgctcatgaatttagtaaggagcttcggttggttatgctcagagcgcgtgggaaattcgacatcttcatcctaagctggttgggcttgtggcagtcataagaattattttgcgcaagcctttgcatgtaacagttcacttaaatctttcaacctgactcttgtaatctagctttggtgttcttttttccatattcaataaaaaatctcagtaagggtctccc

SEQ ID NO: 9706 - DNA, 782 bp, Zea mays
acacactccttgtgcattggagaatggtggcagatggtatcttgtgagtgggagtgagaaatagaaacgagagatgagatagacaagaggctcctagagtcctagtgtttgatgtttgttgtatggataacgatacgtgaggctgatatgggagagattttttagcttgttattggaccgtgacttaccgacatgccagcccaacatggcaagtcttttaggggagggtcatgcttgaatcaggccaaaataccagggcctcgtgtgacccgtttggcctggtccatctggccatctaaagacatacaaaaaaatgctacaagtaacgaaaatcatctcttgacaggatctattgcatctagtgaatctcatggtaatttggcaacaaagtcttgttgattatgatgtggtacagaggatttagggatgtgttggcaacatcactcttgttgtttcagagatctagctgtgtttgtctaacatgatatgcttgaaaagaggtactactgcaacagaaaaaggtctgaagcttttcaattctcattaagatcacagagtagtcaattggcaatagagactaccacagaatagccaaatttccaccaccagattaaaccgcctccttggacaacaagagggagcaatttataagctaacccagccccaaatcgagtccaaatccccgtttttgtgaataaatacaatgcgccaactaaaccccagattttgagggcaaaggaagacgaagaaagggttgaaaagcaggcccttaaagcctggaa

SEQ ID NO: 9707 - DNA, 803 bp, Zea mays
cgttggtgacgagcattggcgaggggccattcaaggccagagcttcctggcgtcttggacgacggggccattataactggatgcaggtgccctttattaccgcaccagaccagaccagaggtgagctaatataaaaccatgtggtcattaattggctccaaaccagaagtacactgtttgtttggggtctcgatttcgtggcggctggtggttgggctgaagcctgggagaggagggagttgccagttgcctgtggcaactgccaactgatagtccccttggtgcactacatgtatgtgtattcggccccggaggttacggcacaattactttcttgatagaaacactagtacgactcgattagccttttttctttgtatttgttttttttttctaaaacaaacaggataggagagctacctgtttcactcaaaagatatgtacaaagcctcttaaaaatacatctagaaaggagcgtgcctaaaatcaaagaactcaaaaaaaaggggacaaaataacataataaatgctttgaattgtatggcagcgacaaaatctctactatatttttaagggggtgtctaggattggttcaggtttcagctccagtgtggagctgtaggttataataaaaaatttaaattttttaaaaatattttgttaatttaaaaaaatttagccaaaaccgagggttttattaacctcccatttttccaatgaaattttccttggaaggtatttttaaatggaattaaatttccccacccaaaaatttttctataaacctggggaaaaagccagtt

SEQ ID NO: 9708 - DNA, 730 bp, Zea mays
actctgctcgtacccggggatcctgtagactgtcctgcagacccatgtcttcgacgtggacaaagtttgccgttgtgcttcgacagaacatccaattcacttattttggtactttctgacgaggcaattatactcttggatggatcccgtgcgctttagagtggtaatttcagatcggtgagcctgtttagttctgtatatcctcaacttcttttttggtggaacatcagagctgctgcaagtaatgttatctaataagcactgtagcaatttctattgctgtttgtgctgcggctactgtagcgctgctcctgattctggtgcgcaccatcgtttgagttctattgatgtgttgtgcaagcataacatagcaagattctataattcgttccgcgtgtcattccggtgatagatttatgacatttgaggaagggatatgtttgtaataaaaaagtaattcaatctagaacatataaaaaacaggcgctccattagtccctgttcgattattctcattacacatagattagatatgattgaaaaaaaattaagaataaatttaacttacttggtatttaaatccaaccgatctcacccaatgcacatagattgaaagctaaccgaacaagccatactataacatggaccgtcttatcccgccgcccctattaggaccaaaatggttattgtagagaaatttaattaattctttatcaaaagtttcttgttc

SEQ ID NO: 9709 - DNA, 713 bp, Zea mays
ctgcagacatgatatctgtactagcgtagttggaaaagtccagttattgcagctgcactcgacggccaaattggacccggctgacgctgacttcagacctgatggtggctaaacccgtaaaccgacacggaatgggtgagggagtaaaaaaacaatcggacgcacacaggctttgccttccttataaacgacaagaccaaactagcaagagcagcagcgttcagagtttggaaaattcagacttgagctagaaccagaggaacaccaaacacgcacgcgcccaccccccgaaacggagagaactgaccccgcagagaagatggccggcgagatgagctgggtgggcaagaagatccacctctacaacgtcaccatgggcctctacatgctcgattggtgggagcggtgcctattcagtatccttccgctgcgtctccatccggctcagtttcttcgttaatattccacttgcttgcgaatttctccgacctcgcgttgctcgacaccgtcatcagctagggctagggcttacgttagatccgcgtttgattttgggtatctctatcccgacaagacttaggttttgggtaggcatttgttcgattcgttcttggtgggaagcgttttgttttaccgggccaggcaatccgtcgattttgcgcgtgtcttccaatttgctgcgcgaggtttctcatccggtgttgctttgcatg

SEQ ID NO: 9710 - DNA, 537 bp, Zea mays
gcatgcctgcagaacacgcagctcgacgcccaccaacgccgacttcggcgaggacaactacttcgtggcggaccagcgggggtacgagtccatcatacactccatcggcagctcctacctctccaccgacggcaacggcaagctcaaggaccgcaggatcctgctcaacaaggtgcttgctgatatgcatgatctatcagcttatttctcgttcgttttctacgtgtatgcaatatatgagaggataggaaaaggccgatccactactcgtagagataagtttttttcccacaccttacttaaaagaaatcaatgctttgaaaataaaaacattataaatttgtaagtagagttagattcagaatacatacaaaaaagattttagtcagcaattatatacaaatctcttttctaatatataaagtacgagtctcaatggtcatcctacatcattcttcatcttccagcataatacaaaaataaagtaaaactataaacaaaaaccttagtagttgcctccacattcacactcatcta

SEQ ID NO: 9711 - DNA, 567 bp, Zea mays
ggtggtggccgaggaggaggatgacgccacgagcaagatggtcgagcagcagcaggagaaggccccaacttcggttccaagttaaccggagccaggggcacgcccatgttgtgtgccagggcatgaagccggagccgcgcgaggaagcagttgacgtcgctgtggaccagccgcagctgctgagtcagggggttctgcctaatggtgctgctaccgcgtctgcgatgttccatgatcaggttttcattactccttgtttcctgtatgcaagtttgaacattttttttttcttattttggtggaatgactgacaggcagaggtacgacctttatgaagaagatttatggtccgcagactagaatttatcgcctgactgtgatcatgtcttagtcctagagtcttcaaataatccagttagatttatctagcctggacatatatgttcatgtgatctgcctcatttttagattggaattttggattggtgtgatctacaagtaacctaaccctcattagaacctttctcggtagtttctgcatctttttgagacaaatttactgggtag

SEQ ID NO: 9712 - DNA, 713 bp, Zea mays
tgcacatgcatgaacgaacgtacgtgtcagtcagccagtcatgcaatgctatataatatggaacgtgcagcagcggatggatgcatggaccagcgaaaggaatgcaacgcatcgacgtgtggcgtggtggtgaccgatcacctacctgctccttcatgacctccacctcgtgtatggacgtgatgtgtcctcccggtcacgacctcgagcaggatcacgccgaaatcgtagatgtcgatcttgtcgccattggggggcaccctacaggatggaatggcaacaagatcccatcatgtgttccgccatgggcgttagaaatcccataacagcagctagtaaccttcaccgccgtaccgcacgtacgtacctgctgtcagatggatacttgcttcctcctcctcctcctcctcctccctacaccgatgcagcaaacaaatgggcgccccaaccgaacggaagatagaaagaaagaacgacagccgcaccgttgagattgagaatgtacaacaaatggctggcgccggctgcctgcgtaatggttttacctcggaattttggggtcttagcgaggataagggatgtgtaacttgccgatctttgctacaagggcccttgttccaggaagaattttggttgatatcctgagggcttgtatttccaaaaaaagagtttccgtcttattgtatttacccctcccaaataccccagtaaac

SEQ ID NO: 9713 - DNA, 607 bp, Zea mays
ggggctcctttagagttgacctgcagctctgaaaacaactccattttctaagtaaaaagaaacatcgcgccttgcaaaaatcaagtataaacttacggtatataattagccactaatgcatgcatggttgggcaaaaacacgcaaaggagacttgctggaactagtgatgaggcgtgctaaaagcatgcaatacacacttgctagtgtcgtattattagcatagacgacgttgcaaccacgcactgacggctctcgcccagcttccctgtccgttgaacgccttttaactatgtggaaaacagaccgctcttcttggtttcgattcttcgcacgcatggaccatggggagaatttactacgaccaccggggcgggccgggccgggagagcgcgctgggctagccggcggcggcggcgtgcgtggccgctcaggagtgggcgcgccgccgcgctagctagtggggcggcaccgccgcaaagaccgtgcctcgtggccgtcgccgtcgagaccgcgacggaggacgtacgcacgcggtcgatcgtgccaatacacggcggccgcccggctgtggctgtggctctgggcggccaccgccatatctcgcgt

SEQ ID NO: 9714 - DNA, 856 bp, Zea mays
gcgagcggctgctgttcagcgcctacagatgcgccctgcaacacaagccggtgtcgattggcggcagacagaacaaagtgcgtaggaaagattagagagaagagaaaacataatccttaaatctaccttgggattaccatgttatgaatagcacatgtcttcaatatgagggcctaaggccagtatatatacacccgcatgatagttaatttgccctaaacctcttattcaatgggggagtatagtaaaacataaatatacatctaacacctgataacatttgtaacataccttaccatctgtgaaactgagttttaaatgcatttgtttttaccattgcaagcaatggaacgctatggtagtaagagacctaacaatatgccacacatggatttgatggctatgaataatgaacagttgactgattagatatatataggcttaattatttgaaaactgaagaaactggaagggttatgctacacactggagccaatcaagatatgtgcttgctgtagtccagcagaactctatatattagttcatgctattcaggttcttgtctcaagttacatgtttgcttgcttgtgtttgaatgacaaggttatattcttacatttgatcttgccacttttctgttcgaagtaggtagttttatagtttgtgcatatgtagtgaaattccactagatagctgttgttaattgttattgttctacatttatttctgcacagtatatgaaaatatgaatgaatcgttgcttctttcttaaatcttattaggtaccttttctaaagcaccaaagaaggttttgtattgaatgcaccaagaaactgttaaggaacactttactagc

SEQ ID NO: 9715 - DNA, 823 bp, Zea mays
ctgccgcttgcagcatgtagccctgctggttctggagcatataaactgcatgcggagagtagagacaaaaaaattatttatgagagggagaatcacaacaagttttttcattcattcatttcagcaaacgaatgcacatatcagtagcagatgatctacatttttatcctagcattccactctaaacatacaaacaaaacaattgtagaatgtttgagagatgtattttcctatatatttgttcgaagagaatcccacgaatgaaattacactaaatcaaagtctacagaccaatacttctttattttcaaagcctttgaaatttgaatgatgccaatgtaatgcaatattcggagaagcattttctaagagacatttcaacaaacactaagagggatgtccaagatatggaagtgctgacattctcaagacgctgatcatagaggaagacctggtaacctgcgcaaaatcaaatagaaataaggcaccgcgagtgctcgagtgccccaaccagacttcgctatcgtcgtcgcacaaccactgtgcaccgctcgctgcacaacacccgcgcaccgcccgctggacagcccacgagcactgtccacagctcgctcttgcgtaagtcgtaagcgcgtcctcgcccttgcgtcctcgcctgctccgccaattcgctctcgcgcgcaactcgctcctgccatcacgctcaacatcaccctcgctcgtgccatcgtgcgtagcctcgcccctgcgcccatcccgtgacgcactgcccacccctccgaccctctctatctcactctctattcattttccccaccacacg

SEQ ID NO: 9716 - DNA, 662 bp, Zea mays
gggaccctttagagctttcctgcacaggtgccacaatggacttcttaagaagaataggaatcgtgtacataagcttttttgctttattaaaataagagtggtaatggaagctctttgtcagaacctattttatcaaatgtattacacatgtgttgatgtctcaccattgttgtcttcctccctgtgactaaaggttgttgcaacaatggcattcagaatgggtcttgataagagtgacgttgaaccgatatgaccatttgactagcatacaaagttcaaatgtgacagcctatagctttaagcaatgttacactgcttatcacctggactgattcaagcatttgttcttttaaaggtggttcattgtatcttgccagaaatcgtagaagaatacatacatgtatattccatgcagatatccccccaccctcccattctcttctcttttctagacatattactatgctctttctaggaaactggccgtgctgattcaacacaagtcaaagtcttttgcccaaatgagtgcttatgggaattgtccctttttttcttgaaaatttacatttacccaaccctgtctctaaatttttccctaccttaaatgaccttacaaatacaaacccctttttttttacaagtgaaaaagattcaacccaaat

SEQ ID NO: 9717 - DNA, 825 bp, Zea mays
tgctcgacaggttccgggaggagctccgtcgggtggagaagcgggattacggagagtgaacaggggaccccgcaactcaagaaccgggaaggggaccccgccaagggtgccgtacacgctgctgttccccggacgtcggcgggcagggagaaaggggatccaccggcaaaagggatacccaacagcgtctccatatgacaattgacaagctcgctccttttttttttattgctttgttgcagaggatctgattatggttgtcggtttaatttcgttgcgagcatcattgtgttaatatgttttattgcgatgattggtttggaatttaaatctgttgaaagggtctaataacatttttcttttctttttttaaagaaaatccattacatgaatatgtcactctttaccagaagcgctcgttcgaatgacttcaaataaagggatttgacctgtttgtaccaaatcaaattaatgaactgctaagaactgtctaccggaaatatctaaattagttgtcacaactaagggctgttcggtttatttttattaaattctagtttatgtcacatcaaaattttttagatatcaaattattaagtggttaaattttaggtttcaatagatttgaacttgccttttcggttttatttatgtaattagttatataattaccttatatttaatacatataattattatttaaacatcccatatgcttagactaaatttggtataacctatctttataaaccgatcggtttgtctaggcgaaatcatttcgaatcaaatacttttttaaatattataactttgaattacccgacc

SEQ ID NO: 9718 - DNA, 851 bp, Zea mays
aaaatggaaagtttgctgttacacttgcatgcctgcagttgcagcacagaagcattatttagatagcagcacaactgatgtggataaatcatctgaatctagcaatggagtttcgtcaacggagctgtctgatactgacagcagttctgggtgtagagaaaaccagcttgactttgtttctaaagaacaacagcaaaatagttcttgtgataaagaacagagtaattttaaaagagaaatagtcacttgttctgtttcttccgaagtgtctgatctttttgttccagaagatacatcatttgatcagtctggagttaagcaccatgaacttcattctgcaccaagtatcccggatgaatctggtgcaaggaactgtgatgattccccgaaggaaaatgtggatgatgaggagcttgatctcttcattacagatactattttaccacttatgcgatctcgcctttgtgaagattgtgaatcatctccaaggtatgttatacccataaatcagtcttagtatgttgcaggtgacgcacgagaaacttatcatgtatgagtttattttttcattcatgtttgtggtaaatacaacaacagtaacaataaaggccttggggggtaggcttgggagctttaacccaacggaagccgcaggtcaaggttcagacatgtagataactgttttccatgcactcccattcaaggctaaatttttgggaatatctcatccttttaagtcaccttttactgcattttttcatgtaaactttcggcttctcctgcctcttttcccactactataacgggttaggatcccactatccattggggcctttgaagttcttccattg

SEQ ID NO: 9719 - DNA, 751 bp, Zea mays
aaaagatggtaactattttgtgactctaatcagacactggtgttcgtgtatagtaagtgctacaaatgatgattgtgtttagctgtggtcaacagtcaacatcaaaagtaaagtaaaaggagtgaggaaaaagacaaaacatttatcaaatctccgttcgaacaatatgcttggcgggtggagaagtatattggtaccgatatacaagaataagggagatattcaaagttgtaccaattaccggagaattcagttgatgagacatactatgaagctatgggagaaaattattgagcatcgtctaagaggaataacgacgagttctatgaaccaatttggtttcatacccagaaggtcaaccatggaagccaatttcttaatctgacaagtggatgtagtagaatagggagctgaaaggccctacatatgactttcatcgacttagagaaggctcatggtaaaatagcaagacatgttatatggtcatggcgggctttggacaaacataaagttctaacgaagtacattggacttattaaggacatatacaacaatattgtgataagtgttcgaataagtgatggagacacaaaatgacttcccaattagaacagaattgcatcaagggttaagctcttaagccctttatcttttttgcctttgggtgatggatgacatcacaaggaacatacaaggggatatcccttgatgcatgctttctatggatggtttaatgttagctgataaaaag

SEQ ID NO: 9720 - DNA, 525 bp, Zea mays
ttagcattatggatcctgtgatagtcaaaccctcttcctctcaggcagcatgactgtataatcacaagacaattgaaaaatatcaagctgaatctaagcaaagctcgcattgggttaacaattagtacctaaatagaatccctgagacaaggacaaactttgtccttaaagaaactcagggatttttactcaacaccacaaatcattcaaatcatatttatacagtttgtgttagaatgcatctgaggtgtaaaaggggacattgaaaatgctaattattgacaaagctgttaagtcaagggagggtaaagatcatcttgtgcatcctcaaagttcaaacttcttgacatttcaaggcaaccgtagcatgccatataacattatccagagtgggtagatttgtggggtagtgtaatcatatcacatactcatacttgtttctagttctgttggtttgagacttcatgatgttaacattcaggtcctagagccctctgaggtctgagcacctgtttccataatttt

SEQ ID NO: 9721 - DNA, 825 bp, Zea mays
actactgcgtgcacacgcagagatcaagatctgcaccgagctcagggcaatgtaagaaacttggcttagttcatggtcatcgatttgttcagctaactcggcagattgttcaaatgtgtttgtttctttaatttcttttttaaaactctgtgtgtgtgtgttcagttacctgagagccaactacctgcaaggaggcatcccttcagagattggcgagctcgtgcacctcaccatcttgtatggtcctacacattaccatcgcccattgcctgcttgtgattctaaaaaaatatatgttcgaatcgcagggacctgtcaagcaatctgctgaggggcacaataccggcctcgatcggaagcctcactcacctgcgctttctgtaagttttcgtatgtgccattttcatgttggaaacacacaatgctgaattgcaactgatgagagggggggcacccacttaccatgcatgcatctttcaggaacctgtctactaacttcttctccggagagatcccaaatgctggtgtcctcggaaccttcaaaagcagctcgtaagccccctttgcccctcgtttacctgcgagtgttcctagttatgattgttcacgtgatgccaggttcgttggaaatctggagctctgtggcctgtccatccagaaagctggccgtgggacccctcggttttcctgctgtgttgccacatttcgaatccctctcttcggcttgcaaggccttccatcttcactcgatcgattgcatgccgcatttcaaagctttttatggcatttgtatgactgaccggtggagttattttgcttctaatc

SEQ ID NO: 9722 - DNA, 760 bp, Zea mays
ggggaggggaggttgctgccgcttgagctgctgcttgcagaaaacccagccaacatgtacgaggtaaaagggggtaaaaaaagggtaaggggaaaaaagaaaaccgaccccttgtttacccagccaccatggttcagtcctttcttggatggaagcaggattcggtcggcctttttccggtcactagctccagcataagcactccaaagctatacacgtctgatttctcagtagcatgcccgttttgcaagtactctgttgccaccaaagtcaaaagaccaacatcatcaaccggaggtagctagatgatcggcattatgtcatcagagatacatgtttcactttgtgctgctgccaagagatgtacctggtgctaggtatccaaaggtgcccgcgacgacggtggtaacgtgggcagcactgtctacaagcagcctcgcgaggccaaaatcggagacacgaggctccaagcttctatccagcaggatgttactggctttgatgtccctatgcacgatcccgggcgagcaatcgtggtgcagatatgccaggcctcgagccgagccaagcgcgattttcatccgcgcgttccagttcaatggctgctcctcttgttcatctcctgcattcgtaggcaccacaacatgtaatgcaagcagcaggtatagcaaggcatcacatcggtgtaaaatgcaagaaaagaatgtaggcatcctttaccatggaaggtagcattcccaagctgcccagctcaacgaaa

SEQ ID NO: 9723 - DNA, 841 bp, Zea mays
gctgcctgcagaggtgcttcttgtattgcagcttgtttccaaaaggtcatagatatgatcctaatcagttggttcacctttgggtggcagaaggatttgttggttcatgcaatttgagtaggagaacattggaagaggctgggatggattacttcaatgatatggtctctggatctttcttccaattggtttctcaaatgtattgtgattcgtactatgtcatgcatgatatccttcatgattttgcagagtcactctctagggaagactgctttagattagaagatgataatgtgacagaaataccatgcactgttcgacatctatctgttcatgttcaaagtatgcaaaagcataagcaaattatctgcaagctatatcatttacgcactattatctgcatcgatccgctaatggatggtccaagtgatatttttgatggcatgctacggaaccaaagaaaactgcgtgtattgtctctgtcattttacagcagcagcaagttgccagaatctattggtgagctgaagcacctccggtatttgaacctcgtcaggacgttagtttctgaattgcctacatcattatgtactctctaccacttacaattactttggttaaaccacattgggggagaattttgcctgacaaactatgcaattttaaggaaatctacgaacattctaggagcgtacgtgaatgatttcgcgattgaaaagcctatttgccaaattttgaatttaggtaagttaacctctttacaacacaattatgtttttttctgaccaaaaaaagcaagggttttgaattgcaccagttgaaggatttgcattaaccttgt

SEQ ID NO: 9724 - DNA, 756 bp, Zea mays
atggctagacgtggatcctagccacaataatctatgggcttatttgggacaacttttttctgaggagttttttctgagaatctagattcctagataatttagttgtcataagaatctggatatcgcagaaacttgcgtacgggatgaagatgaaggggtctacacggtttagggtttaggaagcgacagattccccccatcgtgacaattgggcggattttgcattcgtgttgatttgggtgattttcacagaagtgattatcacataagcgcactgagaagtgagaagcgagtgtttggcagccagaagccgaaacaaacagacccatatgaatgccaataagcaaaagctattgaatccatgattaaaggccacctaaggggttgtttggcatagctctgctccactctagagcaactctgctccagagtctagattgccttggccggtatatacattcaaacttcatgtctaggttgtgcaatattgtttgcttgagctctaggtgaactagtttattgcataataagcatgtcatgaggttgcaaaaatggttgataaatgatgagatgacggcatgtgcaacatggaatggccatggaaatcgatcatttcagagttttttttttggtttgtgcaggtgattgctgaaagtctatctgaagaggagattgggggtttgaaagagttgttcaaaatgatcgatcctgaccacagcgggacgataacttatgagaactgaaggatggtctgaa

SEQ ID NO: 9725 - DNA, 848 bp, Zea mays
gaaggaacacctggagtagagtagagtagagcacatcactggtttgaacatgtctggacaaacgctctgtacatggtacgtagattctgaacccctgtcaatgcatgttcctccaccacacgaaaagtactgcaaaccatacacatgattcgcatcccaaacgcctttccacatcagtgtcggggggaaaaaagcacacaataaatcatccttacgaaatggtttcatgcatgagaacgtgtttacaaatccgtttgatataattcaaatggaggagacctacgtgcctaccttatgggacaacagcgcattttacaacacagatcagttatagtacaaacctgagatcaacacctactagaataagaagaagacaacaggactccggagtagcatagcacgtcgtcttcagcgcctaaaatctctcactggcaccacaggatgctattttgccctcactactagtaccactgagaaaatcttaaactgcttttggcgctgctactagagatcaactaatcgatctgtgaaagcggatgatgcacacggtaggtaagcttcagatggggcgcatctgggaagcaagatcctctggttaaaaaaaaaactaggtctcggtgggcttttatgagctcgccaagaatcacatgcaagctgttcctcatggtccgccgtccctgctcccgccagcattgccctttcttatcatcgcggcaaactcgctattatcaatctgaccgtcctggaaaacgatgcataatttgatagccctagatgagaggacagaagagagaaaagtaccgagatggatacggaaaaaaagggttaacagggcttacatttgtttg

SEQ ID NO: 9726 - DNA, 809 bp, Zea mays
tgaattgttcaggctgaattgatcggtggaagctgtgcattgactatttttttaatctcagaatcaaagagagaaattgaactgggaggctgctaattgcgagagaagtgatgtctttcgttaggcaagcagacccatcagtgtcctgtgccgagaccacttacatccacaaatttgtgccaccaggaccagttttcccagcacagagatttgtctctggcaccgacttgcttcaccacgggcctcaaccatataatgctgagggctacaagcagtctggtttcaatggcacagcgcctcatgcatttcagagctttgtacaatactgatagctatgctgaatctcactttaatgaagcaccatattctcctgcaatcttcgatatatctcagcagaactctcaatctttatcggataaccaggcctctgatcttgtagagttcgatgaggatgagatgagagtaaagcttcaggagcttgagcatgctttactcgacgatggtgatgagatcttttttgacttgtcagggagcattaacgatgagtggaatgataacattaagacaaacaatgaatgggtcaattcaatgaagaatattgtgagccccgactttccaaaagaggcatcacctgagtcaagcatctgctgtcttgacaacaatgttggagaagcacggaacccgaaacagttgctttttgacttgcgcaaaagcgatatccgaaaatagcatcgatgaagcacagtcaatcatagcagaactacggcagaaggtggcaattcaaggagacccttctcagagacttgcgg

SEQ ID NO: 9727 - DNA, 1006 bp, Zea mays
tgcagctctgccgcctcgctcctccagctagctcctgcatgcttatcgatcacaatggagtatatatataatataatccatctctctctctctgtgtctcttcctgatcgagtcccactcattcatcatctggtatcgagatatatagctcgcagctacctttcggctctcgatcgatcgcacgcacaatatatatgcgtacgctacgatgaccgctgggcggcatgcgccatgtgcacgcagatgcaggtgcagcgcagcatgcaccgaggtgctgcgtgccagctagtgctgggaattgggccgggccgggccagtccatcgtgcttcgtgctaaacgggtttgggccaggaaagcccaaacaatttttggaccgtgccgtgccagcccgaagtgtaaaaacagtggcccagcctggccctaaactacgtcgtgccttcgttgggccgtgccggcccaaggccgggccggattattggaccacataaaatcaaaatattataaccatataaagttaatatcttactgaattaaagatattaaacaattatagcatcatttaaccacataaactctaaatataacaacaatataaactcaatatcttactaaattaaagagattaaacagtttgggcttaattgggccgtgccggcccaaaaacggcccatctatgcgtgccgtgctgggggcccgacgggtcggaatttgaggcccggcccagacccgccttcgggccgtgctagcccggcccatattatttcgtgtcgggccgtgctttgggcttttattttcgggccgtgctcgtgctggccctgcccagattcccagcactatatatgaacacgtcgcgcatgcaggcagagcggttgatatggaaacgtacgtgtggtcagctgactcagctggctttggttacaacaggcggccgggcaggtaaggcgtggtggacacgtacggatctattcagcgtacgtatggtttttgccatatagacgttcctgg

SEQ ID NO: 9728 - DNA, 682 bp, Zea mays
aatagcattttttttgagctggtgtataatcattaattggagtttgcaacgtgcatgagaccaggactcatcgaaaagtgctgttaagaatttacctttccacacggtcagggccttcacaagctaagatgttgacgatttcccgtgcgaggcactggcgctccacgttcattctatctgggctttcccttggaagggcggaattcatcgaatcaagaagagtgccgaatagtacatcatagaccttccggaacctgcctaccaaagggcaacatgaggaaccgccgatatataactatatgatagtgtaaggctggcacaaagtgcaaaaaaaccacatttctttcacaaggtcagaatcgagaagcacacatgtttgctaaaatgggtagttaaacagcatgtattatcatcggtttagaccaactctgtgtaccaaccagatgcagtaaaaatgttcacgagagaaccaacctggaagggaatggggtagtgttagtatttgcgtcctgctccaccaacgtcactagttttggtcggagacccttcaccatacggagaagccgatccctttggttcataattgagacactttcatcaaggaaggtggtgcagcagggaatgccaaagttaaaccaatgaaggcctcttcgggacggcgacctagcatttcagcagtcaa

SEQ ID NO: 9729 - DNA, 793 bp, Zea mays
  unsure (1)..(793): unsure at all n locations
ttgccgacggccctcaggtccagtgttgctggccgcttggatgattgacttccagctcagcagtcgcagctgcgagggaggttgcgacgactagtagtttattacacattcgtgccccatacatgtaatgtaatgtaatgtgtgcgtggcacaaactactctgctcggtgggaggaatgcatgcatgcatgtgacggcgagcagcagagcagctatactgttccaaaactactctgctcggtcgtggcaaaagtacaggatttttgaaggttgattgagcttccaacacggcataatctacatattaattagccgtggcgtatttggatagaaccagtggcccgctggttagtactccctccgtccacaacaacttgtcaattttagtttatcctaattcaatcactatcaactttgaccagttatttttagatttttcataagattttataacataaaagtaaaaaaattactagattcatcgtgacttaaacttttataataactttttttagtttaaaataatttagtcttatatatattgttggttaaagtttaaatattttaatttaggataaatcttactccgtaaaagacaaaactcacgtgaacagaccagtaacaatctgtctatgtaatgtactaccagagtagccagagacatgcctatgcatgcagcagctagcaggtgcatcgatttcagcttcggtacccacccgcccgccgacgaagaagattctttgcaggatggacggcaaaatggctagctggacaggacggaaggcngcaggtt

SEQ ID NO: 9730 - DNA, 797 bp, Zea mays
tcggtacccgggtatcctgtagagccgacctgcagcatgtggcagcatgattttattttgaccaacctgtggcttcttctataatatccaggacgccgggcctatggcacatcctatccgcccccatttcttatattcaagggtgccctaatgctcaaattattttctgtgatttaaaattcatttactctatgttgctttgaatcagaaataaatttatggtttgtaaccttttaaatttcactggcagatggacaacttctatactggtgagtttttgttgtctcaaaaattggcctgcatacagcgaaatgcaaaaaaccatcaactgatttattattcatcccctgttgaacatttgaaatcttatctgatgaatctaccattctatccctggtgactttggttatgaataacttggcagttaccgtatgtgtttttcatcttgtcccctgttaagcaaatactttgatagttaatggttaaagctctgacattctttttttgttgctttctttgttctttcatccaaccattatgggattcatatcaagtttacgagaaggtttgttcatgtaactatctttaatttccatgcatttatagaaaatggcaaatgagatgtgacctgcacatgtgtttggtataaggtgctgaagttgtcagaatgtacaagaccatgtttggagcatcaaggttcccaaaggtaaatttagagctttgacctaaaatgtgaggtaccaagtgtaggatgaaaccgtagtcatttagtgataaccattttcatgaggatatcc

SEQ ID NO: 9731 - DNA, 742 bp, Zea mays
gcccgggaccctgtgagtcgacctgcaccccccttgggccctgacaggtcctgacagggagggagggtaataggcattttagggtgtagggagcctttgggagacttttattgcttactctacaagtttgttgtagcttaaaaagggaaaaaattagggaaacttttgaaatggctggaaaggttaccaaaaggccacccaaaaaacggttttaaaatgtcccggggggttgttgccagttgccacaagctggatcttaatccatacttaacagttgccaatgttcaagccctggttcgtagcctcacgactggagaacttaaccaccatcctacaagcatgttttcagtgtgcttatttaagagagttcttcatagaaacaatatgaaataacctttctcacttttgtgctctcttgatattacaattacaatcaactctcttctattgcactatcctaattttttcaagctccatcttgagattttgcctctacagttgcatcttgatcaagagcaacttaacttcctaataaatttcttcaagaatgattcatgtaacaatgatcctcatttgcattgcgaaaatgatactgttgatgtgaagagcacaagcaatggaagcaatatggttgtggatgaggcattactttcctttctttcaggtatttccatgttcatcaccacatattttaacagactgccaagtgaactacaaacacaatcgttagatcttgttggat

SEQ ID NO: 9732 - DNA, 822 bp, Zea mays
gcccgggccccctttaaagttaacctgcaaacggcccgcacggcatccatggagaacgacccgaaggaggcgaggcaggggcagcttagggtgttcccgtgggggatgctcaaggtgttcctgctgctcggcttagggctgtccgcggccggcgtgctcatggcgcgtcacgggcacgaggtggcggcggccacgctgttccggccgtggctgggcgtctcccccaccgccgccgccgcggaggggctggagcactcgatgacggacgaggagctgctctggcgcgcgtcgttcgccccgggggtgcggcggtacccgttccggcgcgtgcccaaggtggccttcatgttcctcacgcgcggcccgctgccgctggcgccgctctgggagcgcttcttccgggggaacgaggggcgctactccatctacgtccacgcgctgccgtcgtaccgggccaactttacctccgaatccgtcttctatcgacgccaaatccccagtaaggttagcccacatccctctagcttcatctggatgagttatcagcaaaaacaaaaccaaacatctcattttagtgccaggattgcacatcgagctaaactgcactcttcgatagattccaaagcaacattagtgccaggagaagtatcaatgtaagtatcagcggcgatgtaccgaaactatttaatgggctttccacaaactcgggtaatcttgtttctgaaaaaaaaagcagtgcaccactgtactgaaatttgtggcagcccagaccgacaaaaggtttgagaggcaaacgtaaaagctcctggcatttttgggctg

SEQ ID NO: 9733 - DNA, 798 bp, Zea mays
taccccgtgatcctctccagtcgacctgcagaactccttgaacttggggtaatagactgtgtgcttcacagtaatcgatgccaagttccctgtttacttcaaaccactgcgatcctttgcgccattgtgtgagatcaacctcaggggtcatgttccagtcataccgtccccgtccatatggtccagggtcatcaatagccatgacaaagctctaggctcgagttgagaaaatattggtacgtcgtgttgaaatcaaatataggaatgcaagactcggacacaagcacaaaccattcgttggatatatccagcaaagcgttggcaagtatacgtctctcagcatcgcacatggtcatctgaccccattcagcaacctgttaccaacagtacaaaaatcaaacagaagccggcgtatctgattaccaataagagacagagatgactcttctagatgatcaaataatagtaagcacaatttaggcatatgaagtaggttgtcccataaagctcgaataacatacagtcacagctcacagcaagtagtagaattcaaatccgtaattactatgagactggcgagaaacatctataaacaggcaataaagatacgtgctcccattcttcattttaaaagagtgggttttctcaaaagtcaaaaatcacaacattttcaagggcttaccaaacaataacccgtatatagggtgggtgacctcagcattttggaagttaccaaaactatatgcttcataaaggaaataggtgaaaatcgaatatattggttctaaaaagtaaagt

SEQ ID NO: 9734 - DNA, 1004 bp, Zea mays
actactccgcgcgatgtcggaaccatcgactatcgaagggcggcgtatccagggagagctcaagaatctcctgtaggatgccgcagtccgacgggccgaaagctctgcctcccgaaggcaggggtacccctcggagcatcgcgccgcgacttcccgattcgtgcaggaagcctcgatccacatcgggcgcacgcgcaacacggcgcctgcggccccgggtcgcctcggcaacgagcaccaccgccgcgaccgtcgagcccacctcgatgagagggtgcgctgaggctaccaccccaggcgtgggggacactacgacagcggggaggttcggagcccctcgcccgaaccacccggtccgtagggtcttcagccgggccatacgacgggcgccgttcccgacccggttccgaaccccgactaccattgcaaagtactcgggggagacgaggccggaactgtggctcacggactaccgactggcctgccagctgggtggaacagacgatgacaacctcatcatccgtaacctccccctgttcctctccgatactgctcgagcctggctggagcatctgcctccggggcagatctccaactgggacgacctagtccaagccttcaccggcaacttctagggcacgtacgtgcgccctgggaactccctagatcttcgaagctgccgccagcagccaggggaatccctgcgagagtacatccgacggttttcaaagcagcgcaccaagctgcccaacatcaccgactcggatgtcatcagggcgttccttgccggaccacctgccgagacctggtgagcaaactggggcgcaagactcccaccaaggcgagcgagttgatggacatcgccaccaagcttgcctttggccaggaggccgttcgaagccatttttccaaaaaggcaaggcagccctcaagggaacgggcagccaaggaaagaatggtccccctgaagggcgttttccgctcccaagccggtgggccaccga

SEQ ID NO: 9735 - DNA, 676 bp, Zea mays
agctgggatacaagcaggagctgaagcgcggtctctcgtacgttccgcatgcatgcatgccattaatttccaaacccaccagctctcagtgattcactttcttctctgcgtagcgtcgtctccaacttcgccttctccttctcaatgaatctccgtgctggcgggcgtgacgacgacctacaacaccgggctgcgctacggcgggccggcgtccatgacgctgggctggctcgtcggggcgctcttcaacggctgcgtggcgctgtccatggcggagatctgctcggcttacccgaccaccggcggcctctactactggagcgccaagctcgccggcaaggactggggtccactcgcctgctgggtcaccggatggtacgcactacatgcttccgcttttttttttttaatttcgcctctcctttaattttttgaatcagaaaatacctttcattcgccgtattcatgcatgtcactttacggagtagacaaaactggagcctggatgacgacgtttttgtcccatcatgctgccggtctatctagttaccctatttttttaaaaaaaaaatctctgtcatgtttcacaggtttaacatcgtgggccaggtacgctttggctccatcacagagcccatcaccatcagatcatgaactgcacactacttacacgcct

SEQ ID NO: 9736 - DNA, 792 bp, Zea mays
gcaccgacctcccggctgccgtatccgccttcgccgacgcgttcgtggactttgccggggccgggattttttttccggactttccggtcttcttcttggccccttcttggccggaaaactcgaacaactttcttcctttcctaatccgggttggtcgccatgggagatctccacggggacctgcccaagtccttttccgcgctccgcctcgccggcctcgtgcccccgtcttgcacccccgactccccctccgccttcttctcatgggccgcggggcccaccctcgccgtccagctcggcgacatcctcgaccgcggcggcgacgagctccgcctcctatacctacttcgccgcctctccctctccgcagagagccgcggaggcgcgttcctccccatcctcggcaaccacgaggtcatgaacgtctccggcgacttccgcttcgccacgccgcagggttttcaggaattctccgcctgggcagggtggtaccgcgcggggctcgccatcaagcgccgctgcggcgagcaccttgacccgcagccgaggaacccctttctcggcgtgcccaaatccttccccggcgtcaagccggagttctggggacgggatgcggtcccggctcggccggcctccgaccccgacggggccccattgcgccgccgggtttcctggccgacctccctaccgtgcttgtagtgggcgactcggtgttcgtccatggagggctcctcgaggccaacgtcgagtacggcctggagcggatcaatgcggaggtcagcgagtggatcc

SEQ ID NO: 9737 - DNA, 785 bp, Zea mays
aaatttgcacatctcaacttctacacatcaatcagcattggtagtgtgacgttgaacaataaatatggagaatggggagataatgaccattacctccatttcagaagtacctcaacaactctctatcttgctataaatgccctcaacttcatcaacttgtcagtaagtgttgccatgatcactacgagaagactatttccttgatgcttctcataattaccaaacttctgttgtgttatactcgtttcagctggtctgtcacttcagcactccaactggttatttgcttgtgcaatcatcaatcattgattatggtgtttgtacaaatgaaaacttaacattgatgtcaaatccatggggctccaaagaatcaaatgatagtttcaactcacaatttccaaacagtgagcttaattagaaaagatcccgtagtaaaatcttcagtacgaacttggctactaaatgatatgacaaaaacagagccgaactgtagccaatcagccataaaagtgttctagagactgttgattctctacaccaaatcagaccaaaatcgttcatgatcagcattaacagaaaagtaacatttggggaaatatactacacaaaagttcaaaaaacaactgcacaattgcaccgttaattgtaggtatatatatcagcaatgcactattgtatcttgaaaaataaaacataatggtagatcttcctttcttttgtggataccaacccactaacaggtaatgattcctacaaacaatctctctcataactagtcttcttta

SEQ ID NO: 9738 - DNA, 768 bp, Zea mays
gacctgcagtacacttgcagtctctaactactcttataagaaggcaacattcaagaaaattccaaagacacgtcatccttcatatgaacaacaagctcatatgcccttcttttattttagcattgttaaatctgaaattttaatagtaatacacgcaaaaccaacttttcaagaagtagctgttttggtcacactaaggctctgttccaaacctctaaaactaatagttagcagctaaaattagctgagactgagagttttagaacggatcagctaatagactagctaatgtttagttatacctctcaaatagctattaattgttagctgcttcaacccaactaaaaccaactaacaacttattagctgactaataattagctctagaggtttggaacaaggcctaatgagcgcttggcatgatccttaacttggccatgccaatccatctggagtgactcaagacgagtcacaccaggatgaacggagtaattgtcatgcaaagtatcacgacagactcaccttctgggtcacaccaagcagctttgcagttggaggagtcatgccaagctcattggcgtgacctaaatgtctagatcttgaaattcattttgcacatgtaagtgttaaatttaaattaagaaaggctaaaataaacagatggcatcaaaatcccaattataacaaggctaatgtgggattaaccataacctttttaaacaattttattggccctttaaaggtttttaaccaaggtggaaaaaaaac

SEQ ID NO: 9739 - DNA, 775 bp, Zea mays
ccggggtacctctagagccgacctgcagcgcaggctcctgtcttccggcggcaaggtcctcagcgaggaggagaaggccgcggagaaagtgtacatcaaggtccagatttctcccctatttctctcgcccttccttccttgctctgttcaggtagagccttcggttcctgatcgagacgcgattgtgggtatgcgaccggtgatacgattttaggattttcttctagttccgcaagtgttggagcagagttgtgatgcggtgtttctgtgtgaccgcgtccttgcggcgacctccgcgcttgctgggacatggagaatggaggtttttttccccctggggttccttgttgtagtaagagcatctctaaatctcagtttaaggagttattaggaaaaaaaacacgtctctaatagtaccctaaacaatgttgctaaatttaagaagttgctgctgctctgatagatgtactgcatgaaatacttgagtcttgatatgacctatctaccatctatacaagcctggtgctcatagtgggtccgcaagtgttgtggcttggggaattttatgggggcatttgtgattatacccctgtatagccttgcaattgttattttacccctcgcttttcaactttatgattttaccccttcgttgtgaaaactaagctctgtcatacctctgcgccgttacgtgcaattaacggtgttaaatctgatgtggaaagacaaaaatgcctatgcaatttggtgtgattgtacccctggtggggttggg

SEQ ID NO: 9740 - DNA, 757 bp, Zea mays
gatcctttagactcgacctgcacggaagaggcacagctgggtgaagcaacaggtcttatactttagcttattctattgcgatgtctgacaaccacataagcacactgcaatctggaatctgcattgattgtaataaccattgtttccaggaaacaggcactatccttactcatcaccagaagacagtgatcttggatgctgatgctgggaatcatagaaggaagatcgttgctttcatgggaggacttgatctatgtggaggccgatatgatacaccaaagcacactctatttcgaactcttcagacatttcacaaggaagactactacaacccaaattttgcggtgagagtagtttttccacatttaccgtatcaaactgaatttactaagaaccttatgcaatggccacaaaaagaattccatccttgttgttctggaacttcgttccattttgtttttcctttattaggagacaggaagcttgtcgcgattttgttagatcctcatgtgccgataatttactctcaggttgaagatgctcgcggcccaagagagccatggcatgacttgcattccaagatcgacggtccagcaacatacgatgtcctgaaaaaactttgaggagccgctgttaaaaggcgtcaaaagcgccagtgcccgctaataaactgtcaaaattgtcgaggtcgcataatgattcgctgctgtggatcaacaagaaacctgatattattgctattgacgaaaaaatctat

SEQ ID NO: 9741 - DNA, 502 bp, Zea mays
acagcacgaagtcaagtagccccctagcgccagtacacctgcactggccacgaccaccgtcgggtgcccgcccgagccgggccgccgccgctgcccggcgtcctgccgccccacgcacaatcacacacctctcgtcgcacggccaccggatccagccgagggaatatcggatctggtggccctatcctcctccaccgccagcccgtcatcgccgacgaggaggtccgggggaccaggcagccgcgtccgccccaatccagcggagaagagaagagagggccccgccgccgccttccccgcagggccgcacgagcagccggcatcctgctcgggcagcggtgcggcgagaagaggcgaggtgaggatggcggcgccgcggcggctaggattaggtgtcccgctcggtcgcccgcgcggggggccgacgcgagcgtctccttctctctgatgtatagaaataaaaccatctcagagcaaatcgattcgcgcggacacatgccgg

SEQ ID NO: 9742 - DNA, 769 bp, Zea mays
ttgctgttctgcagccagcaaaatagggcattaatgatagcagtgggatcatcctgcaaaatacaagtaacaaaaattaacgacaaaaaagaattttccaaaccaaaacgtagctagattatcttgtcggaagtttatagctccagaaaatctggaacaaggacgagaggaaatgcacaaaggaataaagaacatattatctcaaaggtagcaagttcaaacttcaaaaaaggaatctcttgagaacagaaggccacagcaaaattggggatatgggcaaacaagaaactacacgtgtatggatctaggcccacctatcaccagtgggtatggcatggtatagatcaatgggtgagtgggaaaacatttatatcatgttaattattgagttatgactacaaaaaatagaagatcatagctatggattgactccggatcaagagttcaatgggactgcggcaaaaaaagacacaaaatatactagtccctgacatcagttgtatactcttagtgacaggaggcatgaacaaatgcatgtatagtgtactccccacaatagtaaaatagtgagcattatctagaagggcttgttccaaatgtcaccaggtgtatatcactcgtcatattcacaacaaaactaactaaacagcaactgggtttatgcagatgcagtgccagcaaaagcgatccatgcatgcatcgaccacatatggtaagtgtacactcagactaatggcataaaggttaaccaaacatttgttaacaaagt

SEQ ID NO: 9743 - DNA, 676 bp, Zea mays
agagctaggaaaataatgcagtgcgtcagtggcgcgcagtgcagggtgcttgcatcgcatataatatggcccagaggccccgagctagctagcaaggcgcgcaagcaaatacaatactgtatcgttctgtacttctgtatcattttttgctgctactcgaacaattggtgcatggaattcaaaaggtagctccatttttttaggaaaatgttttcgcatgcactacgcgcccattttgtgagagtggtttgggaaaaaagaggggccatactgaatgtttaggactaatttgttgatcagagaacgagattcataagaagcaatccctttgctttttaaagattcctcccaataaatccttcttaattatctggccatcaaaccagcctttagagcatcttccagagctcttcagaaaatgactcctgaaaattagttttaaaggacatctaaaaaattagtgaagtatgttttaatcttttctctaacagattctttaaaacgatatattatttctggagagcctaaaaatcccctcatttgtagctacaaatgagagagttttaaaggctataaaaaagtggggaacacttttggaagaacttgtgtgagaccccgatttatgcgttttttccccttaaataaattttttttttaaaggagaagaacttttttt

SEQ ID NO: 9744 - DNA, 751 bp, Zea mays
ccatcaacatccatctcagtatcatcttcctgaaagaaattacatgtgaatattatgagttatgaatgtggtaaattttattaaaaaaaactcactcgtttatctcatacaaaacagagtgatagcactgtaggtttagataaactagaacaagaagcaggcgtagcaaaatctgcttaacagggcatgagcttcttcagttcttcacatacagaagattcagaccaactaagtctaccagatgtgaaaattcacaataccattttccaaagttttagtgtagttatctattacacaaacaaggaaaactaagctctgaagattcaactgtagtaatgactttttaattcatcctcagctagcatcgcccatctaatttcatttctcaagcccctaaatgtcatctgctaggcctagtatcaagccataaaaattgtcagatgaaaattggcccacctggaatgtacctctgcaagtattcaatgtctgctgtaaaaatattaagattgctataaaaaacatttcacaggctccagtttgtgatctttacaacagatgtcgcaagaaagtaaaccggtggtcaaggcatttgggctgcgcggatctgcacgcatgtacacacagctctgttgtcaaggggcgtccggaacctagggtaggctggcccttggctacagagttcgtagccacggtccgtcgtcgccggcgaggttttgcctctcagccgtcggcatgttgggagagagaaaca

SEQ ID NO: 9745 - DNA, 765 bp, Zea mays
aacataatgcaacaaacgttaaaaaactacagagatggaaaaaaaaacagtcaccataaaagatgacttgtacaacaagttcatgcaaaaaaattattattactattaatgagctaactacaaacaaacaccccaaatataacatcatgacatcaaaaggaagacatgtaccttgagggcaccaaagacacggttcccagttgtagtcctaataaggccaacatccaagagagcacggaaaggcctcctctcatcagctggctcaacagagaagtcctcaccagtggcctgatgaacgaaaagaaacaatataaatgcccaaccaatgtgacatcagcaaaaaataagatcgaaatttagccaaattttacctcaacattgccctcatattccttatctaaaccacgggtcttgagcacacggcgagccaacagaaggccagtgcagtaggctacaagatgagtgtaagcagttgaactagtgaatatataaattcattaaggtacaatatgcaatttacacaatatttccagaagggaaattaccagctgcatagttggtcagaccaacttcaagaccatatcgtggcaactcatgcgagtaagcagaagcaagaaccatatcacctgctatactagcagagatgatttgtgctgtgatgtccttgttggtctaaggaggtctagttaagaggtacaatattatgccactgggagctcaagtaccatagtaataagcagaaaccagatgattaaagaacaaaga

SEQ ID NO: 9746 - DNA, 832 bp, Zea mays
gcttgcatgcttgcagagtccatagtcaccgcatgagactgagatggtaagatcacgggctcttccgctatcattctgcttattcgttcgattgctgcgcctgtgattgtgcaactagcgtttacttgggtagatttcttcactagtggagggactggagtggcaagggcgtaagtagccgccgcgttcagttagcgcggtgatgggtcagcatgctggctggaggaaggctacacttgtggcaccgagcgattcgtgctcggatcgacgtttaggtagaagaagtatattggatgggcctttcggtattatttttttggatgtcgaccaaaaaatgtttgatcgaagggagggctccggacccttctgcccaattgactaagtggcctactgttcgtggctatagtcgtttagtttatcagttattgccatctgctatatagcgtatttgagattgtatgttcacgcgaggatctattgttgaaagtctgtcatttggtcgtttcttaatctttccagggattacgattctccatttcttgaaaggtttcaattgttctggaaaaaaactctgttatgtttactagatctgtacactataatggatataactgtttttatgcctctgcaaaattttgcggattctttctatagatgttgatgtgtcatgagagctatcttaaattgggtgtcacggttccttgacaagtatgggactattggtagaatgttctcgccatatgtactgcatctatattattgacttaactgggactcttgaataaaatatgcttttgcagcttttgtttgagtatgaaccctttactgaata

SEQ ID NO: 9747 - DNA, 753 bp, Zea mays
ttgcatgcctgcaggtacccaaaaaaaaatacaacactacacatgtaaacttgggtagcaatggcactacaagaacactcttatttggcacatcatgcatctcaaaagtcactctacaaaaccgagtaaactatacgatatgccttctacacgagaaaatgactgcttgagcttaataagaaacatggaaccccccgagtttgtggagaaggtttcctatcagcctatttgtgatcccagaaaatgtgaacctatccattatttattagtggtgtctgccatggactgcaccaaaccgtttgtttacaattgccatgctctgtgacttgtttgctaaaagaaaacccaggtgacttaccgtttttgctactaactatgcaagtcaagccatgcaagaaacgccttatctaccgatgatctgaatcactgtgttctcacaagcttaggcgtccacctttgccatgcaaaccatctcccttccccagctttaatatctgcaatccttcttttcaagccaaagcgtttccgcttcctttcgtcactaactaactcctctgaattgctgatcaagggatgctccggcgttccggtttcgctgttttaaaaatatttcgcaacatcttcagacccttgcttatttttgaacgggccttggttgggcccccagccttattgccacgaccaagcggcagtgacttgctgattcctgacttggcatgcactactctggcgagaagcttcatcacaattgtg

SEQ ID NO: 9748 - DNA, 731 bp, Zea mays
atgggaaagtgctttctgcgcctgtagcaaagccatggccattcaagcctcctaggtgccccggcctgtcctcctttgttcatgaaggtttgtgaatgctccctcctttttaaattttctgttgcttctgcttgttttgatctgaaaactctagtttcctttggtgttttgaaggcgtatctgatgataggagctggggctgtcattcacagccatggaatagagacttgcatcgcaacaatgctcatccctggtgcaaaggagttcagagtaagtcccattccaagtgtattcgatctgatttttagatcaaacacattcacccgcctttattagaaaggttaacgaaagcctaggatccaccgctggggattccagcttacatgaagcaaggattacaggtctagtaacaaccagcaccgctcaactacaaccttgaacacaaaagaaaattccgcacaactaccaaaagttttgccaaaaccagctaactcagactaaactgatactgatcttgtctaacatttcattggccacttccatcgacttgggtttgagcaatggacgctaggtcgtcaacatcatcaccatcttgtgcatgaatggtgtgggggagacattagtttgttgttcgaggcaacgtcattcctggccttcaatctgattaaatttgtgaaatagggttattaacatttatgtgctgatcttttaggtggcattgaacagtccaa

SEQ ID NO: 9749 - DNA, 791 bp, Zea mays
gcacgttcccggggatcctttaagtcaaccggcagtcaacgctggtttgaacaagggggggtccaggggcccatccctcaacactaagcgctttgacgacgacacagagaacctcgcccgtgagcaatcatctgtctcgggccatttttcccatgaacaatctgatcgacgtttttttgtgcctaggatcccaatagataaattcgggcacttgtccaccgttgatgtgataaatgatttatatatgttcatgttcacatctctcgctgttgatgatgttttcttttaagatggattctatacctagtgctttaaggctctcactttatttagaacactagccaaaatttctcttcttaggatttagatgggaaagtaatatctcttgtttgcacaattgttaaattatcatcgtgcatccattgtttctttgtttctggccatttcgttatggcaaatcaatggatgttttataaaatgatgctttcttggttggccacttgtttgaaagtctgaggataagttatggatcctatgacattgatttacttgcgggagtaagcctgaaatattgcagcgattgtgactataacaatctgcttgttgcatgaatcaaccttgataacatctggtactttcaaccgactagccatttgcacaccatcatataatatatatgtttatgatagctgatgagtttccacagacttaattactacgtgggcactgggcatgccttgaacaagtgtcttggtgaatccattgacgctttagtggcattatatttgttg

SEQ ID NO: 9750 - DNA, 566 bp, Zea mays
acatgttgctgctttggcaaaattagtgagagtttacattgcttgaaacgtgtattcagctagatgatccttttcactttcttaatttctttccttagaaattttatttaggtccccttatcattggatcagctatgcgtttcgccaaaaaaaaaagatgtgtcgtttatatactgtctccgccgtggtttcataaaatttacttgtattggtcaacgatacaagtgcggtgagttggcaattattattcgataaaaaaactgataaaatttactgcaacagccacgcgagagcgcatggtctggttcgagtgcacaacctcactcttacccctaccacgttagctctcgacttcactcacccctaatattccagtgcacaagcttctatagccatatcagtttttctatttcagaactaagtaattcacgcgatttattcaacgttcagaaatcacacaacataattttttattgaattaaaaactacaaagtgcatgataattaaattaaaattacatgataattaaaaagtacataaatctaatcgaactgctcgatctaatt

SEQ ID NO: 9751 - DNA, 509 bp, Zea mays
acctcgcagttggttctggatcctaaaatggaactgtcaagcattcatcaatgctagttatttgaattttgttcatttagattcaagggttctggtacttttcatggtttagatcacaggttaaaatgtttttagagcctctcctttttgttataaggtcatcttctgtacttttactaatgtaaattagtaaatattctactttgcctttctgtactgttgattttgctcttcctatgttgtctaatattttaattttgtgtcctatagcttaatacaggagacaacagtgtggctgaaagtactggtgttaagttaaagcctggaaatgcaggtttacttgggtaagctatctaacgtcttggctgccaaaaggaaataaataatgtttataatcagtgcctgttttggttgactgccacacttcgccacagtttgattcaattgctcggttcactgccacactgggcgtgcctctgaaaacatataccttccatcatagatatgtt

SEQ ID NO: 9752 - DNA, 743 bp, Zea mays
catcccgcagtaaaatagataaagctattattcgtaatattatgtaatacgtacacgcaagggcctcctcaaaatcttgtttggaaatgtagtagagtagtcgaagtagtagtaggaatgtaggatcacctagtaggaaagatgcttggcacaagtctgatctgctttggtatagacttgtgtctagttttatttttctgttgaagcaccttttaatgatacttttcctttgaatgttggtattaatttgatacctctttgcaattattgtatgtgccacaatttaatgtctgttgatttctttgcggttcaggagcttgttggagtttttccgcaacaggtgctatggaaggaataaacaaaataaagacaggctctctggtcagtctttctgaacaggaactaattgactgtgacagatcttataatagtggctgtggtggtggcctcatggattatgcttataagtttgtgataaaaaatggtggaattgacacagaggaggactacccctatcgtgaagcagatgggacatgtaacaagaacaaggtaacatggggttgtataaaagtagcttcacaaactgtttaatgcaccatgccatgtttatgtgatgtgtttgcttatattacaagcttgacaaagccaagttgtggactatttgatgggtttacaactggatgtatcctttcccaccccaaaagaaagaatttgggctaccttttagggcctggcatgccccc

SEQ ID NO: 9753 - DNA, 735 bp, Zea mays
cgacctgcagtgaattgttctatgggttttgtttagggaacttaatctcaggttacaccttaccccgatattaatagtgatagtggtggggtcgaggggtttaataataaattcaggtgttctacttttttttttgtagctataccaagaaaagtttttttcaacctgactactgtaatatgacatggcttatttctgattttttaaagttttggttcatgagaggtcgcacttgaccttctttgttgtttccctggcatcagttggaactttatacaattattcaatcacagctcctaaaatcttccctctaattcctctttcttaactagcccagccttatctatggcttgggctggacggacacttgaaatggtgctgttattagtggcatttggagtgcttggcaaagaggtggtctcacacttgctgcaacatggtacggacatttaaatgttcagtccacgaagggctgaatattactatatcataaaaacacaaggataaagcgctggatgaaaggcttcaagacatcattcatcaatgcctggaccttggaatgtggctagagcgttggtcagcgggaaacttgttgtggcccaggtgggtacgaaacgtcgtcttggtgatgtcaccaaagatggtactcactgtgcaagtcaatcttggtgaagaaacgagcgcccttcagcttattcaagagctcatcaacccccaatatcaaaaacctatcct

SEQ ID NO: 9754 - DNA, 654 bp, Zea mays
attcaagaacagcctccatgctaggcctctttttgtcaaagaaacatccatccccatggatgatcaatgaattcaatccttcctgtgccacaccatggacatgactacatatcttatgtcaccaaggtccaaaccccaaggatgatcaatgaattaattagaatgaaaaccctaaccttaatcagggttgggaatgcatatatataagccaagagtttggccaagcccattacatagaggggtatacaggtaaatacacaaggactgacccaaagccctaacagtattctaacagaattcatccatgatcagtggatcgcctaccttctctaaatagcttaagcttttgagttcaattggttagtgcgtccactctaacaatatgcacgactgttgcaaaaagggcttgagcaaggccccctcatgggcgagcagaaatccatttttttgtagccataaccaatgaatgtgtagagcccacccccatagtttcaagattgagaattccaagaccaccatattggagcggtctttgaacgttctcccaagagacaggacaattacctccatttgccttttcttgacccgaacacagaaaacctcttcgaccttttatcaattgctttgatcacctatttcggtgttttggggatg

SEQ ID NO: 9755 - DNA, 794 bp, Zea mays
  unsure (1)..(794): unsure at all n locations
ttcctttaaactcgacctgcaggaccttggttggttctttcagaagcatttaaccatggccaggattaccataaaagggggaagcctcattagcagcctgaaaattcaactagactgggataaaaattcaactagaacaccatactgtttcaaacagtggaatatatacatgccagtaaatgaataggccgaaatggttatactttcacatgaggattaggaaacacatgcacagcagtcagtacacgtccaccaagcatcatcccattgaggccagcacatgccttagaagtaacggagcggtcggcatactgtccatatcaaattgatcagaagtgactatgatgatcatatactctagcctacgcacacagcacttatacctcaagaaatgcacagggtccaccgagctcattgttaaaaagaaagcggtatgcagccaatgggccaaatgcactaacaatctccattagctgaaagagaggggaatgcagtaacttttcaggaacataagctataacattcacacaaagaacaaaaagatacttaatatataaagcaccgatactgatgtctatcatattaccatcttagatgagatcactccagcaatgcccgctattgaaaatctgtaaaaaatcaaaaggtgaatatcagaaaccattgtgcattttcttaaaaaaaaatgaaaccagtcaaaatattttcttatggcttaaaactatttttctgaaatcagtntaaacttcttntttttttccaaccaaatgaagaatgttgaagaatggggcttt

SEQ ID NO: 9756 - DNA, 746 bp, Zea mays
gcctgcagacaggcagttttcctaatgggggtcaagtcaagggaaccataaggagaccagttggccagaagggtccaggtaaaggtattataaccaaaaattggagtttgagggtggttaagggctacccttattggggcaaatatctacagccgagtgcaattgggcagcaggggctgccattaaaacattgataatcttcaaagttattctgcattaagttaaacaaactttgactttactttttctctggttggggtccaatctctaacattttcctgttcagcttatttcatggatattgccttacatcttagttcctctatttttgtctctggcctcaacttggtctctttacttctaaaaagacaagattagttcctttacttgtataggtagatatggttagtcgttccacccatagccaataatggaatatatatcacagaaaataccagtgagatagaatcatagaaggagataggttattagtctggtccagtttggtttgcttgactagattgctttggttttgtgctgtatcacttatacccaacatgaatagctaaacactaggatcatgcaaatatgtgatatgtctcctcaaggaccaggctttcctctacacataacgatggtccacaatgattattttccatcactattagctgtccataatatctggggatagtcaaacagcagcaaggaaccccacctggattttgggttgtaaagacccggtcctt

SEQ ID NO: 9757 - DNA, 675 bp, Zea mays
gcccgggatcctttatagtctcctgcagcaagaaaatggcacattaaaagggtccatataccatggacattctaaaaagcaacctattgctaagaggaaattgtctggtcattgtgaaaggtactgagagtatttctaagaacacctagatacgatgtcatttagtccgaacctggaaagtaccttgaagaatgtaagctaagacaaaaggctgacaaagcaataagcttcctctttgacacgagccataatgttttgcttgacattgcaccacggtcacctgttgccctcattgacctggaggattcagaaataaaaaataaagagaagaatccagctaacaagtaaaatcatatgataagaaaactaaaatctacgcgaaccgatagcaacatctatagtaactgcacagagtgacagaaatagaaatggtatgggggtatgtagagtatttttaacaaatcatgactttttttaataaacacgctcttatcttgtagcaaccagccaaccacaaccacttatctgatgccaaacggaagtacggaactagtttaccacaggtgccacacaccacacagtacacttgaagaacaaaaagaatgggaattggaatggaaaccgccaagtacaaacacgagcaaagtatgtagcaacccagaactgcttggttct

SEQ ID NO: 9758 - DNA, 717 bp, Zea mays
ttgcctgcctgcctgcagctagcgcgtgcctacggtcccttgaaaacgaatcttttttcatgacacgaagataacgcgtactagtgtcacagggcacctgtttatttctcagctaactaaaagttagcttaaaccagctaactaagaattaatatttaggctatactccctccgtcccaaagttgtagcagtggttttatcacttgaatttttatgtctatattcaaatagatgataataaatctagacacgtatataaaacacgcacattaagtaaaatattatatgaatctattaattatctaaaatcaattttaatttaggacaagatggagtatctttttaggcaaatcttttgactagttgctagccgactagctaaccaagcatagcttaatttaagcgaattgcccccgaactagtaattaggcatatgcccatatgtgtccaagccggccctgaatatgaggttcaggggaaaatcatggatatatagattgttgaagaactgtatgctggagacaggacacctagctaccacgaatcagagagggggaaaagaaagatatcccatgcgctgtgcgccgggcccggtagggccggatttttataactgacagaaaaaaagaaagataatggaaaataaaaaaaaccaagcgtgctggtgctgcgcccgcaataacgttggcttcgctgggcgctggctcctgtgcatgg

SEQ ID NO: 9759 - DNA, 636 bp, Zea mays
cggtacctcgctgttcctctagcagtgcgacctgcagctttgagtagtgtaaatatgtttgtggaactgtcgcacatacgcattcttcatgaaaatatgatcctatggttacaatacaaagttcatagatggcctttgacaagaacaacgtaccaaatgaggtggttcacacagaaattgagcttgtgcaaacaaccgcatcaaatggaaaatggggcgcccaggaaactggcaaaagccttaccgggacgactgattcttgtcaaccctctaaggccttgttcatctactccaatccagctctggatgccttgcctatttacaccaatgcagctctagattagccctgatgagaagtaaatccagtattataatctatgtctcaaaataatccaaacctacttaatttttttattcggttaaacccatcatggattattaccaaggattcgggaattttgtaaactatggaagacatagattctatccatagctcattaagtatggaacaaatccatgaagacattacataagtttatattagaattcatggatcaaaagaaaactatctttgagagatacatagattaaatggtggatttaatcccaccatcaaattgggtgtgacatatggat

SEQ ID NO: 9760 - DNA, 503 bp, Zea mays
acgaacctacccaagcaaacctgcttgggcctcgtccgtccccagcccagccggggccccctcctttaatttcctttcctgtggtgacgacgacgagacgacagcgagtggtcgaaagcagcactactcccacaggccacagctcgctcgcgggacatgctgcctgccccggccccggccatttccaacaaccaatgagctcgcgcgccatggatcgcgaccggcctcggctataccaatagtgtcacgcacacacactatagctactagtcgtcgtcgtcgtggcggtggtcatcgtcctctctctctctctctctaaccagtctagctactagctccgtagcgtactacgcgtaccatcgagaagaaataagaagcctgcttcttagccattcgtgttcctcgtggccgtcgccctcgccgtcgtcgtcacttgaacgaacagttgcgtggcaagtacgtgcgtacgtacactcgtacagggactagctagctagctagct

SEQ ID NO: 9761 - DNA, 843 bp, Zea mays
ggacaccgcctgcctcagcagctcgttgtggtagcttgaagaggttgttgtagctcctgaggcagccggcctcgtcgtagtttccgtccttgctcgagcccgggtacagcgtcaggtacagcgggaagcacccgatcggcagcaccccgggcaccaccacgtccaccgcgcccagcccgatcagcgtctgcaaagcgtgcgtgcgtgcgtgcgcgttcaggttgcggccggccggcggcggcggcaacgatgacgagtcacgacgacatgttgtgtacttgtgtgttacgtttgcaggcggtaacgacgataagtacctacctccacgccgcttgcgatccggtccacgatctccggcacgtagctcctgacctcggccatggccttgccgccgaagagcggcgcgttgtagtcgttgcccccgaactcgcccacgacgaacagggagctgttgaagtagctctggcaatctgcacgcaagtacatacggcacggcacattattaattcactacgattaattcatcgaatccactgataatcgcccgccctgatgatcttggttagcgatggcccacaccacggagagtgaaacgggtcgtcacccggcgcccgcagatggaggggcatgagctggctggaaccacttggattctgggtgcccaaggtgcccattgttccagatgctgctgccgaggccgtgctttattgaagaaattcaggtccatggtggtggcggccaatgattggccattgttcgcgcccctttccttgacgtccccggcggcccgattcgcactttaaaccgggcgggaagaaagccggcaagccccaaaagtggatc

SEQ ID NO: 9762 - DNA, 789 bp, Zea mays
ttgacaacattagtggaaaacaaaagcagccaagaaaattaagatttacagataagggactaccaacctgcacctcatttcatggctcctaaaccggatctccaaaatccagcatgctaacatgcaagaaagggcacgcgctcatccgaacctagaagggccataccaaaccatagcctctgaagcatttgtgacatcatagacattcaccacaatatcctgattgccagcaagtttgctcagcaaattctccacaagtgactccacatcaaacgctccaccaagatatctgggagcacacagcaaattattctcttgaaaattagataagcatagagtatcatttgattaaattgagacaagctgcaatgattataacctgcatgatctattactaaatgtgcctgccataactgccataagcacgctataccttttttaaaaaagaaacacattgtttctattatcacctgttactagacatgttaaggtcatcatagtcaacctaaattcagtattgatcagtgaaccacaaatgtggcatgatacacgatgacaagatattacatgatcaaataatagtgcacaaaattttattcatacccacatgttaaacatgagtcttaaaggcgacaatgctagaatatttggttaaaaataaaacaacaaaagatgtgagttagaacatctcacccaatagttgcttccacacgttggtcaactgatgcatcagcggggagatcagggcgggacaccagcacagtgagaactactcccaatgggttgatc

SEQ ID NO: 9763 - DNA, 670 bp, Zea mays
atcatgttcttctttagcagtcacaacctgcaagcccttgagcgcaacagcagcaccgctcttgcttctgtccaatctcttcctcacgttctttcccaactgtgtctgtggcgccttattgcttgagttattcatctttagcccatttttcacctgcctaaactttgatgctagcttgccgctccttgacgaggaaggtgacacaagtgacattgtcgtcaaacccaccaccatgccctgagccgccatcatcgactaccctgacatcttcgattgccacagaatcgcgctgtacgatggtgatctccacaacctcatcatcatctttgaacctggcggccttcacgcccttccggcttgattctcccaaattgccactgtgtgggattaatgttgcagtgtcatcttgtgacctccttgaactgcccgtgaccgtgtctgccatattcttctttaccgctgaggttcaagttcttcttactctctggtcaaaagataaaatgagtaaccaggacgagaatacgggaaaaccttgcagtaagttctgaagcaaaaacttgccaactgaaatacatttctcatctatccgtaatcagtcaagtaagaataacttcaagagatgagccaatttctatcacgtaatcccaattttttgatattttttaaaaaa

SEQ ID NO: 9764 - DNA, 514 bp, Zea mays
tgcatgcctgcagtagtatgtattcatttttcgaatttcgatgaagaataatacatgcgcgataattacaagttacttgtcatgcactacatccatgggttggccatgtgggaaggaaaagggagaagccatggtgtgctggtgggatggagaaatatgctagtttcactttcttatatttattgttctccttcatcattgaatatttcaattcttggaaatacttgttctttggagcaagttgagctcatgagcggtaggtgtcaccatcatcatggcgtaaagctaggaatggttagagatttctatctgagagactggcgtgtctagcctaccacacacatagctatccatactggaaatttccatcactgtttggagaaattgcaggaccagctgcatgagttctaatgcagtaaaaagagggaaagatggagaaatgtagttgtagtttgagactctgcatagtagacatttgtgatggtcataggtgggatgggtctcttggtgggga

SEQ ID NO: 9765 - DNA, 761 bp, Zea mays
ctgtagagacgacctgcagaaagattctgcttatctgggtcgcactctttttgttaaaataattctattgttcatggttgtaatttttgccaggcagagtagaatagtaactcggttatcgaataacgttcattttttgaactaaacggggacaaataaaaaagaaaggagggactacgtgctagcatcctgactccttaaacatacatgaattggtgcagtctcgtctctcggcaggaaaataaaatctggctatgtcctatgctgaacttactgagtttattggctccactaagtagttatagctattagttaagtactgaattttgggtgtgttctacctttaaactcagaagtgtatgaatcttgcaggtttgcaggcgatacaaacaatactaccagcagctgcaatctgtgatctcctcgtttgagacggtttcggggctgagcaacgccgtcccctttgcttccatggctcttcggacaatgtctaaacatttcaagttcctgaaggggatgataatgagccaattacggaacacaagcaaggtcgctgccagtgatggtattggcaaggatgatatggcgaactttgcgcttatgggtggtggagcagaccacctgaggggaaacagcgtgaacacgttcagccaggctcacaacatttggaggcctcaaagagggctttctgagcgtgcagagtctgttcttcggtcatggctggtcgagcacttcctacattccgaagtatatgaatgtca

SEQ ID NO: 9766 - DNA, 815 bp, Zea mays
gcatgcctgcagccacaccattccggctccggccgggtaagatggcatcgatctttctgagagcaagccatgcggccacgggccacgggagatggattacgtgaatgcgaaaagagatcagagacccgtttcgtgccccgtgcacacaccgaaaccggcagacaggcgcggccggcacacaggttccgccgcctgcatgcccggctggccggggcgtgcacggtgcacgagctcggcacatagcatcgaaagcgacgcgcgccagcccggctcgggtcggcgacgggcgagagagagagtctgggagcgctggctgagcagctgtcgcggtcgtctgtctcgtcgctagggcgcgtgcatgtgctgtgcccgcgcgcgcaggctaggcgctagctagggatttgcacggagggcgtacgcgcgggagctgtaacaaccgggcagtggcgcgacatctatcggtcttagaagcgttgggcgttgtgttggggtgaaccccggcacgggccggccgcgcgcaatgggctggttgccagcgtcagcgagcccgtgagggaggccgcggctcccatgccgcatcgctgttcccggcatttcggtccatggcgcccggcaagcaactcctgtgtctgtgtgcgctgcgcgcgcgcgccgaaaccgggcaacgctttccgtagtccgggccgctcaagtcacgtgcgcgcgcccacgcaacggcaatcggcaaccagaccgatccttcgaggccattgaatttgtagcaagtgagaacccgcgcgctgcccgctgaaggggtcgatcacctggcacctgtt

SEQ ID NO: 9767 - DNA, 743 bp, Zea mays
gcctgcagccacccaacggcagcctattaagccggccgtccttttccccacggccgagggcttttgttgagcttaatcaaacatgatggcaccaatgtgaggttacttggatcacgaggcttcgaccaaattatgaggatttacgtttgttggctgttacaattggacagaacttatgattagctctattccttagacgcaaatcaattcaagcttgagtatagccttgggcatcctatgttttttgatggtacaaagacctacaggacgtacaggtatattaaaacgaccgaaagttttaaaaagccagcgagaatatacaaatgaaaaaaagggagaatcattttcagagttctgttctcaagttgaccagcgccgatgacagcatgagcctgctatgttgttgctatgccaacacaggacaggagcacctgaagcttagctaaggccatggacgcgggctcgcggcgcacacctgcctgccccatgcgtcacccactcgtgtccccggcacccaatgcgcagcgacgtcacgcacggcgccgggcgcgtgcatgccaaggtgcactagtacagagaagttctatagtggcgggtgtaaacctatttatagtggcgtttttcgtaaccgccagtgaaaatcaaacatattttaaaaatagttaaaaaatttatttttattaggcccacccaccccgtatttttcgcaagtcgcggcatttttcgagccaaaatcgcgcgct

SEQ ID NO: 9768 - DNA, 740 bp, Zea mays
tactgtaatcagccaatgaaaatctgaagtagcagcaatcacatagtatttgcactacaccaggaagcctgctttacaattcctttgcttcacgatgctgctgaacgtgaattatgacacacccaattaaaataccctatttgagagatttcaatatggccgtcagacaggaacttgtccaatgatattaatatatgccattaacaaacccaaaacagcaactctattactttttgcaccattaataaatctaaatatagctaattttaactcgtaaaagatacaatgaaacgtacatatatttcaaggttcaccatgcaaaaaaaaaggcaccaatagctaaccaatcaatgtcaggattctcacttccaactgactagagcatcaggtccacagcaaaacatggcatattttatgcaaatacgcaaacttcaaactgcacccataatcactaaatcaactaaaacttgtggaaacaaataaataatgttattgtcactatggttttcattaccgagccattagcatgcaaaacaggttaggtgataaaaggaattaatgaagagatcttttcatttttttttataaaaacacaaacagctgttaaatataatcaaccaggtagtgaaaggcatctagctgagttggttaggtggtatgagtaccactcctcaggttctgagttcacacacttcgtgggagcgattttcaggctaggttaaaaaaatctcctcgtctgt

SEQ ID NO: 9769 - DNA, 825 bp, Zea mays
  unsure (1)..(825): unsure at all n locations
gcagagctccgcctcttccatttctgatcactgtccgttgttactcggattgcatgacttctttatgggtaggagatggtttcatttcgaaagcttttggccctggttggatgggtttgtggaggaggcccagatgtcctaggaatcaacatgttgatgctaactgtcccctgaaaaagatttgctgacaagctaagtcgactttctagtgatttgcagtctctgtngntcacaggttaaactggtcatattaagcagcaaattctagaagctaaagaaatcttgcaccgcttggaaatcgcccaagattccagattgctctccccgcttgagacctggctgcgcaggaagttgaagtgccattcccttggcctcgcttccctggaaagcaccatggcaagaacgaagtcaagattaaggtggctgaaagagggtgatgctaagttgctaacacggtctatttccagcaacacacccggtacaggaagaagaaaaacttcatctcaaagcttcaagttgatgataggttgattctggaccaagaggagaagaaagaggctgtttggggcttttataatgagctgcttggaactgctagacagcgagacttcacccttgacttgctggcctttcactgtccggctttcaaaactgttctgattttggagcctacttgctatttgatgaggaaatctgagcccacctttaatgttttggcccgtttgacaaagcggcacgggcccggatgggctttactggtcatttcttcaaaagggcttggtcaccaatcaaggaggatttcatggctgctgtggattggctcat

SEQ ID NO: 9770 - DNA, 752 bp, Zea mays
cttgctgcctgcaggcgcagccgttatacagtaaggatttcctctttctctctctgagttttcatatcaaatgtatgccatcagctgatcagctcagctgtaagtactaaacattattccgtttttcgttcaggcaaaacagcctgccagcagatcaagtatccgcgacaaacgaggctgcctccttggtaaaatagtctctccattccttaaaacaaggccaaacttttttgttttggataagaggaacaaaccatacaggcatcccagtcatataggaacttatatagtgcaaaccaatcccttcgtgtaaccgtacaaacttataatctgaaccacatgatgttgatctaaggaaacgtgagaaagagtggaaggaggatttgaaaaggtgtgattagcaacgggcagttaagcgtaaaattatccacgcctctgcatcccttggattaacatcatgtgattcggattaaaagtttacacggttgcatggagaagttggtttgcacttcccaaatatatagtccatggatgaacacagaaatgtgtacagcacagctctcttttggtgcagacgtgcaattcaaaaggacagacggtccatgggtgcagtatatgttaccagataaatgtttctaaatttacggtataaagcatgtatatttcctcaattcccagcgtcacaaccaatgaacgccctatataataatttataatatgagaccgctcttgtaataaccgccagccaaaaa

SEQ ID NO: 9771 - DNA, 511 bp, Zea mays
aactcatggtccttgcaatgggaacaaacagggccaccttgcgatgtgacacccgacctgctttagtttgctcatgcagtattggagtccttaattcattacatctgattttcttcttcttctgtttattgggcatcgttttgtatgttattctacatataggggtagtaatagatcacaaccttttcgtttcttcttaattcgtttgagctctaaattaactttagctcaaaaataaatagaagtagagctcgattttaatccatccttaaattttatagtgtaaaatttagagtatattaccaccactaattatgcgtggacatataaaaagcaattcaacggcgtggtgaaatgtcttcgtacaaaacaatgcgatgaaagaacatgagcagagaggcctatatatacctagtacccacactacccggaatccgggccttcgccgagtgccggcggctttgccgagtgctttttatccggcactcggcaaatcagactttgccgagcg

SEQ ID NO: 9772 - DNA, 807 bp, Zea mays
tagcgcgcacagcgtgtcgaacagcagcttcggccggtccctgcaccgcaggatcaccaccgtgtaccgcctctccgcgcagtccatcaccacgaccttgggcctcgccacgccacatccaccgctctcgtcacggccgccaccagcctcctcggcaccgccgccgccgacgctgtccagcatcagcgtatgcaggcgcctctccgcggaaattcccgtgccgccgcggttgcacgtgccgtcgccccgcatcacgtcgcggagaagctcctgcaccctggacagccggcccgcgtcgtggacggcgcgcccggtggcctcgtcggtgacctggatcacggcggcggtgcgcccgtcgtgcgtccacacctcggccttcacgatgttgcagctcagggtggcgagcacggcgcacacctctgagaggaggcccgggcggtccgcgcccgtcagctcaatggaggtgaactggtcttccggcagcgcataaccgttcgccggaggaacaaggtagccgtctgattccaggcactgttgttgaaaggccacaaggtgtaactgtgtaagggcgtcttgtaaaaacatcggagaattagcaataaatatagcatgcttactttctgaatatggtcaatgacctccctgttatgaagcttacttccggtcctgatcggtcacattgaacactgaacacgacgtgaaccaaaacaaacaaacaaaaaaaccaaagaaattcatcgtgactggtcaaaacacccaacatattactaagtcaaaattcatttgaaaaactaagcttttataacc

SEQ ID NO: 9773 - DNA, 801 bp, Zea mays
ctgctgcttgcagcgcacacaatgcagattagctatgtgatgggtgccccagcaaagggtaattgcctggcctggtgacgcagctcagagacttcactaatcactggttttttttttcaatctagctggttagctggtttcggcgagagaatcgacattttgcatttgaaacagacacgttccaggacactcggcatgcatttcgtaatcaatttactttcgggaaagctatgtcaacagcaatacgcgcacaaactttcgcatgcattatcatcctctagggctagtttggcaacattacttttaaaaaggatttcattttttaacgaacttagaaaaatagaattctttagaaaaatagagttaccaaactggcccttaggaagctaaatgtgttgatgtttaccgatcgcttctagagatgttaggagcccttagtttgtatctcattagcaaattgatgtatgtgacaaggaataagtgcgcgcacttggtcttggtcatgatacggttgaattttacaataattatgtggtttgtatataattgtcaattttgacatctacttttgtttcttacttttgcaaacaattgaaattctataatacataccatcaaatagttttggatcgcaagcaatattaaagactttaaagacagaccctgattacactagtagaaaagggctcaaaatctgcgttacagtatatttttacagacggattcggttatcaaccgactgtactatttttagcggcagttcttttaaaatcgccattaaaaatggtttttctaaaaacc

SEQ ID NO: 9774 - DNA, 754 bp, Zea mays
tgcatgcacgcagacggttgtttcctcgggttcgtctctctgaggaagacgctgtttcagatctggcggtttcgtggtttggatctggtaggagttacggttgtgctgttgtagtggccgaggaggatttgcgcacctaaatttcgtttccgttgctcctctgttggctcagcgtttcagatctttctggctggatcgctgttaaacgcctgctcatatacaaagtattttcgtgtttgtatgtcggcgggtatggatctgtatcctgccattcattcattctctttaggtggttctgtgccatgaaaactatagtagtgtacattaacgggaaatggatcacaggtgcctgatagtattattttgtgggttacttaacttgtctggttcgtctaaggaaatgttttagaaagcattaatttctgatatattcggtggtgaagagtgatatggggccaacccaatcttgaccagcagaaagcctgcgatatgctgtgcccttctttaataaatatgagatctgacttggtaggtagacgttgccaattactgtacctaataatttatccgatctcctatttgttcagatcagatcacttaagtgaccttcacagaacatgtctggctatgctctgttgtctcagtcgtgcactagtagtgttcaggatctggtgcatctgccagtgaattctgactgcttctgtttacatggtttgctatggtctgttgtttcagtcgcgcactagtagtgttc

SEQ ID NO: 9775 - DNA, 747 bp, Zea mays
  unsure (1)..(747): unsure at all n locations
gcagctagcacacaagcggtagttctcgtcctgcggtgtcgtcgactgagaccgcctcgcaaacaccgaccccaaccacggatttattttgttatcttgcgtcttactggatgatgaagacagagagaggaattgaacagaaagagacttcttcagatggagacagttttcgttttttttttccactggccggccttttgttatacggtttctttcttgcactgtatcaaatgggtttattactgagtaaactgaagtgttcgcctgttagctacgatcgtcgatcaggatggacgagcatagcccagagatcgtgcctgtcaactccccggccctagaccccgaccccgaccaggagcctcaatcttcagaaaggtctcgctattccatcagttcaatgctgttgctaatgcacgacgtatctaccagtttcgttgtcgcgcagggttacccttacctgtttgttttggtttatttcgcaaaattagattagaatcacggggcaccgcaatcctgttgcagaatttgtgcgtgccgaactgggcctttttgccttaccatggctgaatttgcagcggggaagaaggtgaccgtggaggcccacgcccacctgagtctctcaacgacaagctggcactcccgccggccgacctaaacctgtacggcgcggccgtcgcgctgngcctgttactacctggcgactttcttcggtaccgngtcgcgcacccggcgcgcggcgcgccctgg

SEQ ID NO: 9776 - DNA, 567 bp, Zea mays
gaacggcttcatgttcctcgtcttgggaacattgatccctttccaagaacattggaaagatcttgtcctgtccttgggaaaaccttcctcaagtagcatactacgctcctcaatccccaatcctcgacccgatcaactcgaggacatggtgactatgatagagctgtgaagacccgttgctgccaatgagatgctttgtcttccatttttaggtctcgttcatttcggcctaatccggccgttccaggcctctttccggctgaaaaaaattatccagtttggaatccggccctaagctgttcgatcgcagcccgaaataaaaacaaaaccggcccagttcgaagttaccccttgctacatggcccggtgggaatccggatcccttaccatctggatcaaatcctgggctggattgaatggcccactgtctcctggcctggaaccagttcctgcctggaaccgttttcaagcaaccgaacggggcctaagagctcctgctggtgcccatgtcaattggtgccatgctgctcgtctgtctgctgctcatgtgctcgtccgcaccctgtc

SEQ ID NO: 9777 - DNA, 765 bp, Zea mays
gcctgcagagaagtcatgttccagttacattcatacgtgggttcagtcttgtccatggctgaaggtatcaaagtaggaggatgcattattgtgttgcacgtggcattcagctatctcagaattttcaacttgggttgccatcctccatcttttgcattggtttttaattacgttagataagaaaaacatgccgttgcttgcagaacatcgctgtcgtttgaatattgtttttttatcctacttggggcgagtcaaacagattaaaatgtgtttggtgctaatgactagttaaaataagctgtattattgttgtatttagctgataattatttttttaaaaaaaaatcggaaccatttgatctcatcgagatttgtttacctgctgtaggttctgagagatggccgatggggcgagcaagaggctgcaatcttggttcctggtgacatcatcagcatcaagcttggcgatatcggccctgccgacgctcgtctcctcgagggtgatgcactcaaggttgaccagtctgcgcttactggagaatccctcccggttaccaagggcccaggggacgaagtcttctcgggttccacttgtaagcagggtgagatcgaggccgtggtcattgccaccggagtgcacacccttttcggcaaggccgctcattttggtggacagcaacccaaccaaggttgggacactttcaagcagggtgcttgacaggcaaatcgggtaaactttctggcattcttgcttccaatttgggg

SEQ ID NO: 9778 - DNA, 480 bp, Zea mays
agacttgtccgttcaaatggagccgcgtcctgctccatattcgcaaagcaacgcttgcttcagtttcagatcatctagtaatttcgagcaacagatgatccagcaaggactagcagaaagcagcctgtaataaattctagccaccggagaactgggcaaacgctgccaatcattgaagccatcactggatatgtgtgtccatctccatcatctcacaaacaagagccacgcagtcggcacacacacagagacaagtcactgtctcgaagtgtcggtttcgaactcgaacagggcaggtgctcgccgtccctcttttactagccttcggaaagcgcggcctgtccgcctgtgtctccggcctttgccgcttccacagggagtccgggaccatgcagagctccgtaaagctcgcggtgcttgctcttctgctagcggcagcagctcaccacggtctgctgccgctgccgacggcgcgatgct

SEQ ID NO: 9779 - DNA, 762 bp, Zea mays
gtgctgcctgcagagtgtctctcctatcagcgcagcataacagaatcgacctgcccgattttcttggctctcctaccagcgcagcacagtggtgtggccgtgtgggtcggggatttgcacctggatgcaaaggtagcttcacacatgttttttaggatgaaggggggttacatcacacatactatatgcaaatcaagtgggactatcgtatgcccacatatctagctaccaagtagggctatcctaacttgtattccttcggtccacaaatatctgtcgttatagtgtttgtgccagtcaatttttttaagagatttatagaatatgttagaaatatttgtatcttcaaataattttaatacaaaatagactcaaagatctatctaataatactaattatttactaaaagtattaatattttcttatataaatatggtcaaagttaaaaatatttaactactcgaaaaatgagaacgaccaatatttatgaatggagagagtattcttttcttcctaggaacattgatgtggtgtgccttagctattatgctgctccacggtaggtttaggattaaaggatatgattccatattcattaggcctaaatgttgtcaactcaatgataatgttgttggaagtgcaaccaaactgtaaggggttttaccaatggttaaccacccaactaaaggtgcttatgggcttttcttaagaatgttaatatccaagatcaaatacatcgtggggttccttggtatggtgca

SEQ ID NO: 9780 - DNA, 969 bp, Zea mays
  unsure (1)..(969): unsure at all n locations
aacgcatgaaccctatcaacgttccctggattgatcgatcaagcgtagatatcgcaaccaatgaactgtaccatccgaacgcaggtatctccgatctcagaggatgtagcacagtgacgagcacaagttagaaagttgaatttgccagttgagcacagtgcacagttagacacaatagcatttaggacaacaaacagcgcgctccgttagaggcaaatagtgtcgtcattaacttaagacaccanacatacanccgagattattattagaaaaaggaaagatgagtatattaaactggcaaactttaatcaatttacaaagatgttttgtagtcccattttttgtgaagcaactggtttgagatgacattattgcgaagcgcactatttgtagttccaaaaatgcaattgtctcgacgttagaatagtcaattagagggggcctgatgattacataacctaaaaaataaatattccacctttataaatcaggatagattgttgttatgctagtaacaacgttgctgactaaacttcgtaactccgattaatctcataatctaatagattaaactagataaatatataaaactattaactgaaatcacgtctatcggacttctagatctaaagttattaatgaaataagaatgatgttccagatgctaacgaaatttaatcaagatctaatttcataattaagtaataatcagaaaaggttaatatcccaaactttgtagatcaataaatagatggctcggcaatgatctagattaatcaaaagaacagtaataattgaagaaagcaaaccaatctaagatcaaaagtagataaacaatgcttggaatacagctacacacaaaccctacagactcgtatgccgaatgaacgggacaaaacgccatgcttagaagacgggtacacacgaccctactgacgacataagaaggactatggcaaccaaaaacaa

SEQ ID NO: 9781 - DNA, 728 bp, Zea mays
tgatccactgtccaacatcttcctatagcagccagccataagaaaaatttgcatttcgtgggagaccaagacttccatattctttcacagtgctcaaatttggttgatccaataaagagaccttcatatgctgctttggctgaatattttccattagccgccaatctgaagatatgcttatcttcttggtctggatgtaaagaaactgcctccagaacatcccagaggtccaggaagtcagcaagaacccccactgtcaaggcgcccctaatatccatcgaccattttctgtctgttagagcctattggactgttttgcaactcttgattcgcttagggactgctgcaaatagtcttgggtcgaggtcttctattttctttccatgtaaccaccaatcttgccagaataaagttgaggaaccattaccagtatcagtgatcatagctgtggagaagaaggatcttactttgtcagggaactgcatatgcagaaaattccaaggtttctcagaggaggttttggccagccacaaccatctcatcctcaaagcccaaccaagttctttgaggctagcaatacctgtctcaatccccttcttaatttgattcctttctccgggaattccatttaaaaagaatcttgtgtggaatgaaggttggccaaatagtcccacctcaaaaaagtgtccctttcacaaaaatactggccccaaaaaacaccagaattt

SEQ ID NO: 9782 - DNA, 763 bp, Zea mays
aataacatgactagcattgaaccagatggtggtgctatcaatgatgtctgtgtcttccggaatagtggtttagtgctattagccctggacaatagccagatacctgcccacttcattcctgcgctcggcccagctccaaagtggtgttcacatcttgataacttaactgtgcgtgagactgcatcaattggcttctagtaattgatctaataatttttaactgaacatttcatcatttgccttcctccatttataggaggagatggaagagaaaccagatacaacactgtttgatgagtacaagttcttgactaaagaagagatggagcgactgaaccttactcaatacattggcagcagtgctgtaagagcatatttacatggatttattgtacgttatgaactatacaagaaggtaaatttggcttcttttacacatttacatacaactcattacatgaattacacatttatcttgtgctggatttttttatagttagcaattcatttagttttgccaacgactaggtgtttgaattcctgaatttaaggtactttcctttgtttgacacactaaattgttctttgtaaattagatctctcatctctgttactctgttaggcatctaactatataattgatctccatcatggactggttacattctttttctgtatgatcagatgagttacaggaaaaagaccccaaaacaggtattttaccaggatttctctttctttgcagcaacgggcagcaattgct

SEQ ID NO: 9783 - DNA, 811 bp, Zea mays
cctgcagcgcaaaggaaagcacagaaccggttggttggcaaaaaagcccgccacctttgtctttctgccttgcgctgcgccgtccacaccactcatccggcaacctttctttgtctccactcgaacagtattaatttcctggcgcctcctccgtcctccattttttttgtggggtgccgtgcgagctccaagtacccctggctcccttccggcttgggggcttggcttttgccttgtccatttccggctcctccagttggtagtggtcgttcaatgcgagacgccgtccttcacgagcttgattgcccttgaaagcgaagttggtgttggtgtcggtgccggtgaggaggaagaggggatatatggctcccacggaaggtattcttcatttctccccttcccctctccccatctccatgagagattctactgcgcggagcggatacaaagcttgctcctttcattttcatcggaatcacctctgtacattcttccgtctattttgcttgggcgggagaggacaaccgcctggccttgccgccggccatggtgaaactgaaggagtttttcctgcttggtcccgcagaggcagcaggggaggacgagcggctgctgaaggatcttctcgcttcttcgtcagataaggaaggtgagcggcgcttcttttgggggcctggccttacttccccaacttctgtggctcacagcctctgctggatcttttctttctccattttgatgctcgtcttgtggaaaccatcatttctgaccggtcccttctttgtaaacctggattttgattatggctttc

SEQ ID NO: 9784 - DNA, 702 bp, Zea mays
tctaatttttggaccaacaaatatggttgatcaagtcttacttcgtgaacatgtatttaatgaactgcaccagcagcctcaccatttgcaaaggcagcatgatgcagctattgaacaacttattcaagccaaatttggtcacgggcttcatagggagcaccataatgatatgttggatgttctctcacgttcaaatcagagacaaatgcttcctttatagcagcaaattcttttaggcccttcgcatgaacctgaaccaccactttaatcccaaccattgggaaatggcttctgcgcaacattcaggcaggggaagaagaaaggcacttaagtggggtctggccaatggatgatgctgcccagtttatccgctcaggaaccagtccaaatcagagacacggttgtttcgatctcctggagaaccttcagagatcgtcatcgtttgatcatcatgaccatctagaccgcagcttatcgttacaggaacgattgcatatgggtggtctaggtattcactccctagaacgatctgattctttgcctggtggtggtcctggaccaaacacagatgtcataaatgccctatcacgccatcatggacttgggcaggtggaaaacacatggtgatgtatacccttttgggtcaaatgcctatgcttccttcaggtgttcatcctcagcaacataagcatcaagaacagc

SEQ ID NO: 9785 - DNA, 835 bp, Zea mays
gccccccccccgtttgatgttgcctgcagcccttctatttcaaatttgtgtcaaaatttaacttcgcccatagtaacaagtggtgtgcattctagtaagtagaaagataaaaatagaaagaggtctaacagtcaatcatatatgcgaatagcgaggtgaggttaaaatgcttagctaagactaagtttgcgtttgaattctttaccagggactgtttagccttgctgagagacaatgcagaacagggacatgcatttgaatagttggtaagcctatcttgaggtctgtgctgccaaggatttaccgtgctgtggtcagaaagcaaaatctgctcaccttgcctagcaaaggttctctagcctagcatagcaaggtaaggaaaactagctagggaaccaaatgccccctaagtcttcagaagtttggacatattctagtatgcaatagcagtggactactaaagtgaaccagtctcctcatgtagagcttaagaaataccgataaaccatgatcaatttaattgtaagctaattctccaactctctctcactaaggcaaccacgaccctaagaagatatcataatccttttagaatttagagcaacaatcatgcgtagtaaactcggccgataggggaaagaccatccccacggtattatattaaaagaagctcaatcggagttccaaccgagaaaggtcacgaaagctggccccccgtgcaacgtgagggttcgccccctataggccgaatctttactcgtgctttgagccctcacagcccgtacacgaggatccgccccctataggtgataggtcagtccatctcgtgtgcaca

SEQ ID NO: 9786 - DNA, 779 bp, Zea mays
acatccgcagccaacagggcctagagctccaacgccaatgcctgtggaactatgctcttcccgttccacagcttccagcacggcttcatacagctttgtccatgagcaaccatcacctgtcccaaccacgttccagaacgttaaattggggctcggtgtggcgactaccatgtcagcaatgctgccccactttcgctactgatcgtggggaagtccagcgccaagttgtcgactctgtgctcgtagattttcccgttcttgtcgaccttgtacctcgacgtcccgctgaagcagccgtatgactcccatgggacacggggagtgccccacagctcccaccggacaacgatcgagttctctgtcagctgccagatgcgtgatacatcgagcccgatttctctgaacagcaggcgcccgtgaaatctgagtgcccagaagatggtcttgtagttgtcaatgccgtggaaagtgtttagtgggtcgacaaatgtgatgtcttcactgcaacagatgtaaaaagaatattttcagttttacatgagtgtaagaagcatgcctataaagaatgcatttgcaagcgatagcaattcaggcctagtgttcttatcagagataattaatagcatagctgttgatggtgactcgcatatgggatttgtgctgaattttgtttgacaaataaaggggttttattaaattcaaggatccattaccttcaagtttgattacaaattaactgatttaatattatgtttggagcaaaactttttttgatcctg

SEQ ID NO: 9787 - DNA, 782 bp, Zea mays
  unsure (1)..(782): unsure at all n locations
gcctgcaggatggttgtgctacacggtccttatgagcttcccgaacagaagatgcaaaattgtcccaagagattgtcttgttggtgtacagatctagaagttcaactaatttccggcggtctagcaccacacttctccgaaaacccaggaacctgaagaaaatgatccgaacaagtaccacgtaatcaactactgtatattttttattctaaatgagcaatcggtttcacaagctggcctctatatgtatattcataccttcggtgaccttcaacaagctttgccatgttaccatcgaaagtgggaatgaaaacatcgctagctgtggatacaatgaagtcaagtgcagccatctgggaagagtgattttggaattgatgcagaacttcagagtctagcagcatctcctttcgtacctgaaaaatattcaacactgcttatacagcgaatttggttgaaatgttgaataaacgaaactgaaatgcagtgccggcagaaaatagagaaattcactagttatggaacatttgagaactgcgggagatttattgctatgacacaattaaggacattataattgaatgtttttttacaaagaaaggatgcttacaaggtttggaaaaagcagaccgtagtggttctagtctcctatctcccccataaatgtcaccagctgcgatgtgcataagagcatgcttttgaaatgctagagctgtgaaaacaagtgatgcctnctcaggagtaagtgggcacagtccttgcgacctcttggcttgagaatc

SEQ ID NO: 9788 - DNA, 819 bp, Zea mays
tgaagttgctcgcactgggtgccgggtaagttaaatgaaagtccttacattgctcaaatttgggatgtttcaagccctaatgaacaacattttacgtttattttagatggtggtcttatttttatagtaaacatgttacttctgtttcattatccctccaggatatttctcctcctccagctcataagcatgctccacttcatatcatggtgcaataaacgatggatgccagatcctggatcaaatcaatggtaaggattgagctagttgtgttggaacttgtggcatcgcagttacttcagtcttcaggtcctgaagctagaactgaccatggcgtgtcacccttatgtgattctcagtgggttgtttgggttattcttgtcaaccatctcctacattgcttcgtttgttggaattggcgtgctgtatgttctgtatgtccccaactcctcttgtgcgttcaacatcttcactattacatggacggcaatcttggtgactataatgatggcagtatcattgcactccaaggtacgaagatgcaagcagctccggtcttagatgtagcttacattgtgttgaaaaccagtgtcaagttttggatgtgaatatctagttgcaatcctgatagtagccttgtttctattagcatatctgagcccttacggtaactaacaagtaaaattctgtaaaacttttgggtctttgccctgcctgaaatgtacaaggtttgtgattttagttcatttttgtttgctgagaaggttaacgagggtcttctctcttctgggatcatgagttcatatattgttttccttt

SEQ ID NO: 9789 - DNA, 923 bp, Zea mays
gcagtctatgcccaactactacgcatcgttggaatggatctaacctgtagatgttgatgaacacatcaggcaccattccgataaccgaaccccatatgtaagggacgaacttcatctccgtcacggttacagcgtagttgaacaacgcgtatgggaacggcgagatcctgagcaacgcggccacgctttttctgctggaaccagctcccttgacctaccagtttgatcagagcaatctgccgtggccatttcttctccagccagagctgcgcgtcaacgaacaggtgagagaagaagggtagcaaaactaggaaccagggcatcgggaccaaccaaccagccgctaaggaaatacaccgaatcgtagcgctcatgatcagatggaagcttagagacattacgtttaggcggtcgcggaacagtaggccgatccagtaaggtatagacatgccgatggtcaccccgaccatgatgatcaggaagccgaaaccgtagccgaaaactattccggttagccacattggtggaccggagggcagcaacaccaccgggaagaccgctagagaaacgactatcaccaccgctaacacggggaggccgaaagattttgcttcccattcaataattggcatgatcacctgcattgtcaagcgcacataaaatagaacacagagcatgaccacgacaaatggtgcggaaaacttaaatgtcatccgctgcacaaattaggaggaaaaaactgaagtacaggtacagctagcatgacaattgtgatgtgataacccatcatctgcttgataatatgacatgtgaaacttgtctgctggattgtgagattaagcacgcacaatttcttcggactggccgagagaagaagaccaaattcttcggcccgatccgggaggaattgatacaaaaaaaaa

SEQ ID NO: 9790 - DNA, 834 bp, Zea mays
gctgcctgcagttagaaatactgggtgccattattataacgtgggtaatctggtctcatactggggcactagaatatgaaatggtggtattctttggtttttggcttggcttttgcctaaccaaaaaaaattctgctttaaaatggcttgttctggtttcctgtccccatgcttaattctgttttgctttgcagccctcgttggttgctgaagcaggaggtcccaaaagttgtcaagtctatcaacaggcagttacgtgaaaaatcaatcaagacaaaggtcagtccttcagttttcctgcaattcatggttctggaattgtaagtctgattatattcctaacattttccaggttggggcattttcagtactgaaggagcttgtggttgtattaccagactgtcttgctgatcatttcgggtcacttgttcctgggattgagaaggctttgaatgttagctgtgactttcactccctatttttttggacaaaaactttcagcccttaaaaaacttcttgtgaaaccattttttttaacttagtcgatttgacaggacaagtcttctacctccaacctgaagattgaagcccttgtattaacaaggcttgttatggcttcacattcaccatctgtgtttcatccatacatcaaggtattgtagtctatcaatgttgagtagaatttggagactatcggaggggctactgattgtaaatcaaatttccaggctctttctgcacctatactgtctgctatcagagatagatattataaagtcactgctgaggctttgcgggtgtgtggagagctagtccgtggccttcgtccaaatc

SEQ ID NO: 9791 - DNA, 811 bp, Zea mays
ctcggcacccgttgatcgtctagactcgacctgcagtagtgtaattgcatctccggcatcttttgtggtcactagtgcaggccctgctttattattgtatgaagacaacagtgttagttgcacatcaaaattcgtaaaaaaaaagaacaaataaaagaaactttaacattttccagatgttaataaacagactacgaaggaataaccaataccatataaatccagcaaagcaagtgtcgtcctgaacaacattatgttatttccttcaaaaaggatgacatcccaaatgcgaagtactataagagaggtaaagtcttacttagatatcgatagcacacatatggtaacagaatatgtaacctacaaagacataagaaaattttccatatgctgatagtgagatttaaatgttagtgaaccagaaggggattaaccaatattacagtagtgaactaccaacaaaaatattggaataacacatatcataatgaaagaaccaagacactgtataaaacctgaccactttcccatggaagcatattgatgaaaattgaaagaaaccatggtccagttatccatcccacttgaactcccaagaattccatatgtttggctgaagaaaattgcaattgatgtaagtgccaagtaataaccataacaagaaccttcaatagaaaaaacatttaggtgtagatattttgagatacagtgccttcaaaatattaagcaatagtcacaaacatatgtgtgattttttttaacatattattgaacctggccaagaccaatattgggacattattgggaaaac

SEQ ID NO: 9792 - DNA, 774 bp, Zea mays
ccggggcatcctttaaattcgacctgcagtgcaaagttttgcgaaaagaaatggctacatatagtttcttttcttttctgaaagtgaaaaaaataaaatgtctagttttcactgtgcataaagacgtgtgagtgtgatcgttgacaagcgacgcaaaggtgcagtcctgctgggaaaggacacggcctatgaggtgaccaccgctacgacgcccctgtgacgacgactgagagggagagccggcgatatgccatagcattgtcacaattggaccaacatgttgcgcttggtgtttggcaacccatttctgggaggaaaaacaacgggccaggtacctcgagctaggctgcacctgacgatgtgcaatctgcctggccgtgttcatagatcacgcagatgaaagaaaaaaaaggaggcacgagcttttgtctcatgtttttggaatgctttgagattccctgcgggtgatgacaaggcgatcacgccggccacaccatccaaacgttttttttttgcgcaggaaaatcatgcagattaataccagtgtggtgtgaaagggacggactcctttatctacccacccacgaccacgagggcccgggccatcactttcttttttttttaaaaaaataaataaaccacctgaaacccctttttacaggtttgaaagaacctactttttatgaaattaaattattatacctcctttacctaaattatattaaggtaccaggtaatgggatggaaaacaattcttttttaattggaacttgg

SEQ ID NO: 9793 - DNA, 752 bp, Zea mays
tggatcctctccagtcgacctgcagctacatgcaatagcccacgcgtcggcttgcctgccactgccaccccgtgtcctgctgccgatgcgcgctcagccgatcggtcacagcacgtcacatcattggtcagtactcgaccaggtccattttccttttcgggatagcgtgcgtgcgtgcgtgactgggtgagagacgagagggagggagacgcgacgcaagcaagcggcaaaggtactctcgattgccctgatgcccaagtatacagtgggctgtgctgatcgttagcgatgggcctttgttaggccgccagccagccagccagccagcccgccccacttttggatcttttcggcccttataggcggcccacctaccttttcccttgcaccaccagccgcgatcctcgcggttggcagaggacgcgccgaggtcaggaggaggccgagattgttcgactcccccacttgatctcttccttcccctctccctttgcctcgccagccatgacgggagcccccgctccagcagctggtcccggcgccgaagcaaccgcggcggcgtaaccggcggtcgagcgcgatgagccggcaagcccgtcagatcgcgtgcgggttttcggtttttgcctttccctttcccctctgtccttcattctcattcgggtcccgtccccggcgcccccgtggccctggtgggtgggtggtggttcctgattggggggcgcccatgcgccgccccgtgcccttattgg

SEQ ID NO: 9794 - DNA, 839 bp, Zea mays
tgcatgcctgcagccagagctgtgatcggtgaatttgtcgagtatgacctggacaatgaagatgaggagtggcttgaagaattcaataacgagcggaagaatataaaccctgaaaagtaagagaacactattgaactagataacttaagaatatatataaattaataaatacattgtcttaaataaactggttgacttgttaaaggacctaaggatggaatttaacttgtgtgttagagtatgcaccatgtgcatagaatattacagcgaacctgagacttatggaccactccttgcattctaaattataagatgttttgtctttcctagatacattgtatttactatgtgtttatacagtgtatatctaagtgcatagcaagctatgtatctaaaaaagccataacatgatttcgaatggatggactatatgttttcaggctattttaattttttgtcaattgaggtcggcatattcaacaactaagcgttgcagagatgcatatgttgcgttggatatgtgactacacaagattggaccgagtgagaaacgatgacatacacgattggctaggagtagcgctagttgaagaaaagcttattcaacactagttgagatggtttgggcatgtccaccggagaccccccagaggcaccagtgcacataagcgtcataagatgggacaataatgggaaaaaaggttagagggcgggcaaacttgacatgagaaggaggaattcaaaaagggacttgaagggaatgaaatatcccaaatgagttgtattttgatagaagtgcttggaaagaagctattcacatgccctgaaacgggattagg

SEQ ID NO: 9795 - DNA, 742 bp, Zea mays
atttatgacatactattctcatctaacttaatatccgcaaacattagtaagcaaatccatgagtggcgcaaacactaaaaactaacagtgttgcccacataattctactcgctgcaaaatttctttgataatccataatgggggcgcaaagtttagattatgtatgccatattaaacaccaatatttttcaataaacagcaaagtcacttctgttttaaatatctagtactgctgtgttaaagagtacaacactgaaaaaaaatataggagttttgaatttgatgcataagtgttttcacacatattggacgctgaacatcaaacatcagtacattatacatcctaacataaacatcgaacaaaaaagcattcatacctgacgtatatggtatgaacgatgctgctatatcatgaagatccactaaatgaaatataatctgcatgctaactaagttatccccttaaagtttccatttagcatgtggttttacctctatagcagcatctagctgcaagaggactggcactggtcctatgaaagttggtgttatggctcctgctctttcaccagctttgggggcccaaacttcccacttggataagaggaccttcaacctgtgaaccgaggtggattaaatatagaaataatggcccaaatgataaaaatattggccaactggtcttttgcaccaaattcgttgaacgtaagaaagggagtttgaaatttgaactacacccccc

SEQ ID NO: 9796 - DNA, 741 bp, Zea mays
gcaggtttgcgacctacccgcggcgcaagcaactgctgtaagtcgggtaagcatatgatggacagagatgctaaagtccaagcaggtacctgctatgaaacatattggctgatattctctatgtatttcaaattctaaaagatggaatgcagcacgcaggaaagctcatttgtagcagcatgggtgcaagaatggattctgaaccaaagagttggaggatacttggtgagaaatggtgatatgaatcccgtgaccttatattgacacatttacagtttccccttttttgatgctgtttctctagattatgctattcatgcctatttctgtaggtctgacagtctatgctctttatggtatcgtcactgccttggaagtcatttcaccattttccatattatttatgtcactactgctctatttggacagctgatgttctctacgatcttggtactgcattggaagttgtttcgccgctgtgcccacaacttttccttgaagtagcaggcttgggaaattttgcgaaggtggcctttctaactgaatttcttctatttggcatttttgcatgcaaagttgtgttttagtatttatgaacgagtaagaaatgtttcccttaacatagactcaaataaccatacagaatggttaacattgcaatgacaatatatttccctgatttttctgcctgaaaattgagctgcaatgttaaatgtttcattacttcttattgcagggaat

SEQ ID NO: 9797 - DNA, 838 bp, Zea mays
tcggtacccgggttatcctgtagagccgacctgcagctcgcccgccagtcagccagtcagtcgctgaacactataacagagcgcgacgcgtgaggcaaatgctaggatcggcaagaacactgcgaggaggagggaaaggcgagcgcacaaccccacgcaggtgagtggacgtggattatacctggagagggtggtacggcagctgccacccatgcttcctcatggctgagttaacttcaagtccaagaacgagaggatgtcaatgccgagtgagggctaccaagatgtggcgaacatggctgcctcaccaaccatggcgtttctctttctcagacccatctcaggagaggagcagcgcgggcggccaggcggcgtggggctgtcgagcgggcggcgcggcgcagcgagcgaggtagcgcgcgagcggggtggtggtgcggcgcaacgcgctgggtggcggcggccgggcgcgcagtgtgctcgggctggcggccggcggcgggtgcgagcactggtgggaagccggaaaggagataggaagagagatgcgcgggattagggatttaggttgggttaagttcgacggtgtccacgcggcccacgtatttaatttaagaacgtgggtacccacgttttttaaaagggtaagttctcaccggttttgggttagagccccaacgaactttaattgtaagaacgtgggtacccacgttcttaaataaacccatgaacttaattaatataagaacgtcggtcccccgttcttaacaaaaaccacgaacgtttaataagtttcttgtagtgaatgatattctttgtgccataaccaggaggaaaa

SEQ ID NO: 9798 - DNA, 729 bp, Zea mays
cttgctgcttgcagatggtcggggctggggcggcagcggcggggccttcctgccgcgcgacgctagccgtcgtcacggagccccgctgggccgcgtcgctgcgccgggcaagggttctcgtggcgctggcgccccggtgcgtggcgctcgacgggcccggcgccagcggcgaggaggaggcgcccaagatcgaggacgagaggaagaagagcggtgagacgaagaagccggcgcgcggccggccggtgtggagccggatcctcttcgcctccaagaagacacgaagtatcatcatcctcaacgccctcacggtcatctatggtgtgcgaatacttcctttgttcttaatctctctctctctcacacacacagccgctccagttcgtactatatatgctcaactgctcggtctcaaactctactctgcacgattctggcattgctaattagggtattgaaaaaaatagcagtgcatcgcctctgtaatctgtagtgctactccaaatactcttcatgctaaagttctttctccgaccactgtgattggttgtgctgtggttggtattaacagtaaaattgagccttttgtagttcacttttgatcctttttttttatcctgccagcaagtgatattccggttttgaaagaggtcgaagccctgacagagcctgcggtctttcaacatggtgcggtttcgttgtttgcacccattcccccttcgtacccat

SEQ ID NO: 9799 - DNA, 743 bp, Zea mays
cagtctttgcagcctgcagctgctagatttcctctgttccgcaccttgctgaattcagaagaaaccttgcattgtttaacttctctcttactagtctgacatagcctgcgtcattaaatttgtgcttcagattatatttcgcgacctgaagccttccaacattcttctcgaccacaactggaacgccaaactgtcagacttcggcttggcgagattaggacctcaagaaggaagccatgtctccacagtggtacgcaacaaaccatgttcttcgcacaatgtatataatttgatgaggcactgttcttagtgcctgtttcgatcatagtgttaaagtttagcacttcgcttttaacatcttttaacacttctgtttggatctctaagtgcaaaagtttaactaaaaagtgtagtgctaaacttcagcacccaatagcagtttagctcctcaagtgccatgagatccaaacaagcccttagtagcttctggcacattgatcccaaagatagcttcgcacgttcttcctcctggtacctgcaaatcaagtagccaacccgcacagactcattccaccattctgatccggtcaagcaatcggtgcacgcactagaaaaactttgcaatactggtggcctcgtgcccgtggaaacaaggagctgaccatgtccctccgttctttgttattaattatgatttaattcgaaaataaactagatatttgggaatagtactatcttctacg

SEQ ID NO: 9800 - DNA, 779 bp, Zea mays
gagctactggaccaaattcaaatcagcatgtgtgcaacgaatggtcgcgatactgctcttcgttatattagtcctcaaccctgaagcttacccaaacagatccaaaattatcacagcagtatttaggtcactgggctctggttttaggaagagagccacatcgtctgcatagagcaagatctcggtgttgagaggaattagaagaaatgggccacagcaacccatgctcctcagccttgacaaaaaagcacattgaggacatccataataagtataaaaagtagcggagacaaggggtcgccttgccgcaagccccttctatgagaaatgaacctcccaggcaccccattgagtaggatctgggtggaagaggtcataagaataccacttatcacatccctccacacgggaccaaagcccaatttctccagaacttcaagaaggaaaggccaagaggccgagtcgaaggccttcgaaatgtctagcttcaagagaattctgggctgatttttagcatgtagaaatcttgccatctgctggacaagcataaaattgtcttgtatgaagcgacctttgatgaaagcgctttgagctttagagaccagcccctccatgtggcacctcacctatttgcaagaaccttagtaaccaacttggcgaaattgtggatcaaactaatgggtctgaaatcctggcagctatagcatcattatgttttggcagcaacgtaatgaagtctgtgttaagaaatctgaaatttctgaagtctctcccccaac

SEQ ID NO: 9801 - DNA, 750 bp, Zea mays
atcctctagagtcgttctgcaggaaggatgacatcagaagatcagcgctgctattagcgaagacagtattgtccacatgtcacaagaaggtacaacctcttgagtttggccaaggcccctgcttcctataaccaagcagctcaacggggtgtcatggataacttgacagagcttctacacgcagatctccccacaggactttcacaaccaccataatctgttggtcaaaagaaatccaaattttttttttgagaaaaaggcaccactgagaagaaggaaatggcagataacacgaccagaggctgggggcgctcacttccttctgggtagctgtagtgttcaggaggtccaaggtttccagtgggggttttgctccatatttcttcgcgataatagggtcagagaactccgagaggggaatcaacgctattatatttaacacagaaaaaaaggacatagatgttcatgatgttaaatcatgttaggatgaaagtaacaccaacattgaaaatatcttgccctacaatgctatttaatagtgaaaacatgaatagcaagctgagccatatggataactggaattgatcctcaaagcggcaggacacgatgaatgaaacagataagaaaatctgaatttcattttatgtatccaaaatatatactatgtctgtgtatggctaactccagtagcataggcattcggatgtggctgcgtgcgagcacgcaaaaatgtaacccgtccagcagtgg

SEQ ID NO: 9802 - DNA, 766 bp, Zea mays
gcatgcctgcagctccctcgcggcaaccgttccggtccaggcggttctgttcgacatcgacgggaccctgtgcgactcggatcccctccaccacgtcgctttccaagagatgcttctcgaggtacggtggaacgtcgcttttccctgtttcacttttctttttttaaaaccaacgagctgcgtgcgatgtgatgtggtttgatttacgaaaccaaaatggctggcatggcatacgcagatcgggtacaacaatggcgtgccgatagacgaggagttcttcatcaagaacatcgctgggaggagtgacgtcgaagctgcccagaacctgttcccggactgggagcttgagaaggggctcaaattcctagaggacaaggaagcaaaatacaggaggtacgtacaaatgatagctgtggttttcctcagtattagatcaactgaaagattcagagagtaagcgtgttgtccattgttacaagtttacaacagtaaacccctttgcgtaccgtagcacatacataaattacatccatttcagcgctatcacgcaaaaaaaaacaccaattttttgctactcagagagatcgattactaggttgtggagagttctgtcatttcctacagcgcccattcgctgctgatcctgctgaatgtgatcctttcataatcattacaatacattgcattgcattgcattacagaactgataggttcgttatgacaacgtgcatgagtgactgaatgtttctagttggtggttctttct

SEQ ID NO: 9803 - DNA, 689 bp, Zea mays
gcgggaggcgctggaggaggcgtccgaggacgggtccctcgccaagtcccgcgacgtggcgctcctcgatggaggggacggcggtgcggaggaggggtccgtggggcggtcgcggtcgctggcgcggctccacgcgcagagggacttcctgcgcgcgacggcgttggccgcggagcgcgcgttccagtcgccggacgcgctccctgtgctggaggaggcgctcgccaagttcctcgtcatgtaccccaactacgcgtccgcgtcggacgtggaccgcctccgcgccgactagtacccgcacctggacaaggtatgcctcgactactgcggctttggcctcttctcctacctccaaagctgcaaccctgcggactcgtcagcggcgttcacgctctcggagatcaccgccaacctcagcaaccatgcgctctacggcgccgccgagaagggcaccgcggagcacgacatcaagaaccgcatcatggattacctcaacatccccgagtccgagtactgtctcgtcttcacgggcagccgcggctcggccttccggctcctcgccgagtgctaccccttcggcaccaacaagcgcctgctcaccatgttcgaccacgaatcccagtccgtgaattggatgacgcaggtcgcgcgtgacaagggagccaaggcatactccgcctggttcaagt

SEQ ID NO: 9804 - DNA, 854 bp, Zea mays
tagcgtcaaataactgaataaacatatatactacatgtaacatgtgccctgaaatataaaggcttttgagtttgtcctatgcaactatacccgtctacttttagattttgttattatatccgtttctgaattcagattgattgtcaaaagttcttggaaatgctggaccaatactgttggtgtcctttctattgctcccagcgctttaagattttgttgtgttcatttctgattcatcgccagaagtttctgaaaaaggttagatggggtaaggggacgcggttattgtttagcttcgtttgagcatataatgcagggcacatcgagtctctactactattaagaacggaatgtgggtacctggtgctaccacaacttcaccccgcgctgacacactgggcccaccccacacgccccctgcctcggcgtcgtgccttgttggccccatgctcagcatgctctcagatactgccctatggaccccagagtgtgcacaaccaccaccagaccgcacgtaccttagtgtttagaagtaaacaataattatataaaaaaatagtgcaaaacgagcatttgaacacacaccccctactctagaaatttagggctaaccaacagactacacataccttagtgtttaaaaataaacaataattatatttgaataaatatctcaatacctatttatatgttatatttaggatccgtagcaaaagtacgggcaactggctagtaacataataatttataacaaactcggagatccttctattacttgagttaatgatatgaattgttattttaggatcagatgactgacagtgtccatgtaaacaaaaaaatttttgagattc

SEQ ID NO: 9805 - DNA, 857 bp, Zea mays
tagagtctacctgcagttctactcctattaggattgtattgtctatgtgcatgtgtttgtctgatgtcatgcatctttggtactccgttcctctattccaaattataagacgttttggctttttttagattcatagctttcgctgtacacatagtatacactatgtctagatacatagtaaaactaatgtatctaaaacaagtcaaaatgtcttataatttggaatggaggagtatataatagctattcttcatatatctacattgagtgggagattggagtctgataggagctagaaccctcatatgtcacaccagaatgaatgggtgattggagtcgaatgtacagacttgtaggatattccagaaatgttttagcatgccttttgatttaagcatgtacctgttaaaagtcttctgtgttttccaggttaatggagttggaaagaccgcagttacagtggagtacccagagcgtcctggacagcctctctgtgaggtaaataaaccaattctaaagctatttctgattgatattttaggtccaaatgtattatattttgttgtcatgtggtggaaactctggttacgaatgttcttgttattttcagtactatgcaaagaatggcacctgtaaatttggttccaattgcaagtttgatcatcccagggagggtggttttgtacctgtcacattgaacagcggtggattccccctgcgtctggggggtgttctcattgcaatccaggtttctgtttaatctaggatcttgtttgtttaatttatgaaaaattccatgtttaatgcagggtgaaaaggaatgttcctattacatgaaaaactgaacattgcaagtt

SEQ ID NO: 9806 - DNA, 774 bp, Zea mays
agcagggtttgcccaccctgcaccgtcaccacggctgcttggtagcttggaatgctcatgtggatcacatctgctgacaggaaggccttgtagttgaggaacttgtcgatgaactcgtggttgcggtcaagggaaccaatgttctcatggaggagtatttccgcttcggtagttgattgctttatgcagaactcaaggaagcttacatctgaaaggggaagtgtattagaattaacagaagtaatacaaaagattgaattatcctaacttgaagcaagacacagttataaccatttgttccagtaagcttggcccattcactatccaaccaatctctgaagtccattgcctctgcatgatgacagatgttagaaatttgaacatgatgatagtctttaaagaatacgagtaaaaaactttaggtataccagtctgcttgtttgtagcctctgctttccctttgccagattggtttgcagtagcagcagaaagaactggcaatctgcctgcctgagaactttgacgattcagtgcagaatgatccttcatcatggaacttctgctttggctcaacagacttggaaactcagacctggttacgatatcatggtaataaaacataaaaattcttgcagaaccgtatatccatctttagtgatccaaatacaccaacgaaaatagctattaaaaggttttaaaagtctcaaacaaaattaaacaggggaattaaagcctttaaattaaaatttcaaaaagagatccttttctgcaact

SEQ ID NO: 9807 - DNA, 511 bp, Zea mays
gtttgcagaacctgggaaggaagtacaactgccctaatgggctacaagaagggttttgttttggacttggtccaatccaggcagaggcagcaccaaggtagtaccatcatacatgtcccatacaggcagaggctcacatccaaatgatcccataaaactgagggggtgtttggttctcctaactaaagtttagcatgtgtcacatcggatgtttgaatgcccatttcgagtattaactattaaatataatctaattacaaaactaattacatagatgaaggctaaacaacgagacaaaaaagtctaattaatccatgattagcaaatgtttattgtagcatcacatggacgaagcatggactaattaggcttaaggggtaattgaatgcactagagctaatagttattggctaaaagaattgatagtggaattaactaactaaccaaatatctaactaactattagccaatttgctaaaaatagccttatattgaactataagctagactt

SEQ ID NO: 9808 - DNA, 803 bp, Zea mays
caggatcctgtagagtcgtcctgcagactggaaagacaacaaatggaccccaagtctggtttttttcttctcataagattagacaccacttgtgaggctgaggaaggtgggtttgtaaataccaagcagccacttctttatcgggtcattatcctagaatccttggaaaatctttgtttttcagtgctacaacttacaacccctctgatcgactggtggcgtaagagtggcttaattgtaaaggtcactattgatccatttctgccttctctttaatataagatactcgctctcatgcgtgttccaaaaaaaaacagctacttgcggtgcacaaagttagcatttcacataagattgaaacttcggcaaagatgctcatggatgagaacagcagcagatttagtatgatttagtatttgtagtgaactaaacaccacgaaagatggacaatcctaagtcacgccaaagttgtaaacaatgagcccacaccacctagtgcttaaaaggaacactagaggatagactacatttgacaaggtaacatgcttttcagcaaacatttcttatgaaatgagttcagctaacattaccataaccacaatcaaacccacgcttaatgtcttaaaacagtgattaattggctagcaagaatacattcgtagatcatcaccccaacgatgattgtttcaacaaaacctgcacggaaaaagagtgcgttggaatatttggtttcaatcttagaaaatatttatcctactttactggtgaactacacctacacagtccaaatgtctgaaatgggt

SEQ ID NO: 9809 - DNA, 697 bp, Zea mays
cagctgccaacagtgtgtctgctctgcgatgaagaggaacaagtgtccatggatgcaccagaattttttttaaatatatttctttcaaagcaatgacgggtacctgtggaaaggctagctaatcaaaccggtaactgatcggtttgatgactgttagagcacttgttgacgagatattacagattacactgaatgactgagcatgttgttgggcggattcaatgattacgcaacggctttccgtattaaaatgaacaacaaacgtaacatcacagggtttttttttaaaaaaaaaatcttgtcgtgctaatgtaacctcgattaattgtgttgagcctaccggatttttgaatgcgttagccactactactagtctatctactactataacgttcgtccagctgctagctacgtgcgtactactgtaggcgattaggctgggggcagcatctccataattattcattcaatgtgtagtccaatccatatccgcctcctcaagaacaaggagtattgattatttccagtagcgtcagttacgtggtctacgtccctgctgaaatagaatacgttgctcttgccttgttgcctagtcagcctaatgacttatggatcgccgcttgctcaatgatgctctcagttctttacattttccgtcgagaatggtgctgtgcgcattttaatttaattttgtttt

SEQ ID NO: 9810 - DNA, 837 bp, Zea mays
gctcgcctgcagccttcgcttgaaaagttccttctgtgttactccataaaatgtgcagccctttaaaattaatatgtatacacgggtggtttcatcttcccttccatgagtggaatggttatggctatgtacattacatagaatttggtacgtacatgatcatcatctgcatgactgcattttgtgtatggcgtttgtcagttcgcaatgacagggtgttgatttattctgttgccgaagcattctatgtctcagctttcccatggaactcaatcaaaacagaacatacgatttcagatagactgggtgtaactgccatttccaggccatgttatagggtaacttaaattaactgtccttgcagatttgtacactcgttcaatcctctaaaagctgtaaagcggatatggtacctggctttaggaataggcgacatttgcgccccggggtttacatagttcactttcttttgttttctaggactattttgtaggtttcttcgaaggtattggttgaagcaaggtaaaagtgctgatatgtgagtcagtagtgattctggtgcgctatctcacgggatcagctttgcggcatataacgattattgcatcatggataatcttctatattctgattcatatgcactctacaagttgataaaaaaactaaaggaacccttgactgcccgtgttgtttcagccttttaaacccttccttcaggaactctaatttttaattcttaaatgtattagttttttgggaaaagtttcactattattaaattagaaagtggccccctttaagaattttttgggatgaccagggccatccctatttttt

SEQ ID NO: 9811 - DNA, 734 bp, Zea mays
aatggggcaaatgctgtggcagcggcttgaaggaactggggtttccttttcggttgcttcggttctggaaagagaagcaagcttgcttaggaatggtgtaacgaggcactaggtggcgccaagtcttcttgcttcaaggtggtgatgcacatgctcatctcagtctagcagtagcgagaaacatacattgattggttcaacccaaacaaacgtaatgttgaacaatctcgttgtaaccctactcatttgtcgttgcggtgttaaattattttaaccaaaatatggtgaatgtactaggtgggcggaccaaatcatttaacgtctctttctattattacattgcgaggtttatttggaatgcatacatgctatttttaatacccaactatatattgttaaatatttagacttcttatgatgtactttaattcagaaataagacattacatacaacatggcacaaacggacatgagcaacccattcgtcacatatgttgatctactatcgagtaccgaacaagataataacagattctatccacaaatccacaacacatattgccaaaacatattagagataagtttagactagaacaatttgccaccccctgagatgggaaaaaggtacatcccccacccctagcatattacccgcataatggtccagtcagaagacctgtccacgataagaaagattaacacgcttatcttaacttggttggtgggacaaaaaa

SEQ ID NO: 9812 - DNA, 714 bp, Zea mays
tgcagcgctggagttggaagcaggccatctaaaacattaatgttcctggaaggctttcacaagccactgggatgcacggtatgcatgtcgtctgctgctagttcctttcctttcctttcctgtctaatttgtcatgctcatgcatggtgacccatgcagatattgctaaggggagcaaatactcaagaactgaagaaaatcaagcaggtcatgaactacacagtgtttgcagcgtaccgcctcgttcttgagacatccttcttcgaagatcagagactaatcttgaacaataaggattcttccaaagaagaagtttctgtcgctaggaaggccggaccatcgtcactaggatcagtacaggaaactactgattccaatgctctaaatccactcgacaagggcttccctaatcaagcactactcccttctgaaggactagtagtatcagcagtcccagaatcacccagaagattcattgatatactccgttatcataatatttatttgccggtcacttcttctcaagaggcaactgatcatcagatacaagacagtatccatatcagcccaaacgttggagtaccaattggttctgttgagagtgtggatcatttaagcgatccccaggaacaagcatcctctgaaaccaatcagcaaatggcattggacggcccttcggttagtgaaaaacatgagcagtcattggaaaatatt

SEQ ID NO: 9813 - DNA, 822 bp, Zea mays
tgccgcttgagccccaggagtctaggaacagcgcaagcaaggaatcagacggagatgattccccttgttgtggacgagaagcaagaaaaggtttagcaatggtgctaggccttctcttcacttgttgaagagagaattatatatgtactcgtgcgtgcgtgtgtggtgagggtagtaaactggaacttcgtacaagcatcgtttcctccttccatttgtgacactattcgccagcatcagaatgtgaaattgaattaagcgcacgccaggaggattgggcttggatgctggggcttcactcccggcaactcgccggcgtgggcacaggactcccaggccaccggcggccgactctccgtgctccactcgtcgggaactgtgaggaagtgcttgctcatgaacttcctgaacctcttcttgtaatcccttggggaaatcaccgttggcgattcattcttgggcaccaccagagacgctttcaccatcgtctccagctgcttgtcccatgtatactgcctcaggtagtcgatgatgccgaataccagctcacgcttctgcctgtccactccaaccagcaaagagtagtccatgacattgatggactgcaagcacaagcacaggaatggatactgttagaaaaagacgtgtcttggattcctatgaactatgatctatctatctatgtatgaactatggataccgtgagaaaagacgtgtcgttccagattgcccgctccaagagatgctttgctctttcacccatatagatgggagaaacacgcatgtcatccacaaagttctggttcaagtagacagtgccag

SEQ ID NO: 9814 - DNA, 787 bp, Zea mays
ctcggtaacccgtggatcctctagagttccgacctggcagctgggaaggaggagagcgccctgtcgatgctgtgcaggacggcgaggaggtagtggagcgtgttgaggcgcacgtagagccgctgcgtgccgcggctggtggcggggcgcaccgcgtggtctcgctctcctcgtcccgaccggctcgcctccagcctgggcttcttgctgctcgtgacaatgtcgatcctgccgcagtcgagagcctccaggtcgcccacctggcacggcggcgccgccttcttccagagctgcacgagcttggagtcctggttgcaccgcgtcaatgtcggcagaggtggaacgtagctgtccttggaccctgcatttcatcgtggtttgggttgtcagtgtcgtcactcatgatagagatgcatgcatgtctgtaatagcatcatagcatattagcatgccaagtagttaccgcaccacacgaggcaagcagcatagcgtactggtggacgaggtgatcgatgccgtcaacaaggcgttgcagcagctcctctttgcaggccgacgccacctggatctccagcatctcatccacggtgaccttggccagcttcatcagatccaccgcagactgtgcgtacggctcggccttggacctcgggttccaggtctctgcctcctgggcccttctcaagcactcgtcccctaccttgagccgctcgtccatccagcccttgaccaggccaaagatgatggagtccacgtcgtaaggggtcatcggcggctggtctggcgg

SEQ ID NO: 9815 - DNA, 625 bp, Zea mays
gaccactctattaccagtacgtacctggtagtacgtacagtgcgccgagctactgtgtacggttaccaaccaaaatgacgcgtggtccgcggcgcccgtggaaagtgccgcgccggcccggagtttcccccataccgaaccgaagccgacgagcggtgactcaacatgcaccaactgccccccattcggcgcctggccgcatgcagtgcaccgggccaccgccgctcggcactggcaggcagccgccgcaagcccgcaacgtgcggcacaccgcacaccggactgtcagccgcggccggccgcgccccctgcatcttgcagcggcagttctctcatctctgcacggcgtggctcctctcttgcgtgcgcctcgcttttcccaggtttcaccttccctcgcccccatcgtggccacgccagcgcccaaccaccgatcgccggcccgcctccccccacgcaagccctgtacacgtgtccaccggtgccgcgaccgaccaccttcccactgattgcgaccgccccaaccacgtgtcccttctccatcactacaccccgttccctcgtgctccccgccctgagactctctttcctcgctggcaggtgggcgacgcttcagccagtcccc

SEQ ID NO: 9816 - DNA, 897 bp, Zea mays
caaatccaacctcggacccctgggatcctttaaagtcacacctgcaaataagttccgaatttacacccacaaacagatggtcaagtcggaggtcacaaacagagtgatattgatgtacctgcgctacttagcaggtgacaggccgaagacttggctccagtggctgccatgggcggagtacagctataattcttcatatcaaactggcatcaagtgttcacccttccgggtagtctatgggcgtgaccccccgccattactaccttaccagccggggaaagcgcgagtagctacggtggatgactagcttcgcgatcgggatgagttcttagcagaaatcaaggagagactggtccaagcccaagtcacaatgaagcagtaccaagaccagactcagcgggaggtgaaattccaggttggggattagggtgtggctccggttacagcaaaggtcagccgtgggcgtgacaccagcatctacatccaagttgggacctcgtttctttgggccctacaaggctacacagctagtgggggacgtatcttataaattgcaactccctccgaaggcaaaaatcatgatgtttttcatgtgtcactataaaaaattattgggcagttgccagatgaggtggtgccttttccagatctgttacatggcagggaggtacctacacctgagaaggtatccaaggcaaggcttaacagaggcctgtgggaagtgttagttcactgggtggggcgtccagcaagcagaagcatcctagggttcagctagaggaattcccactacggtatccagctatacaggtcacggacgaacttgtttctccgggaggggaagaaatgtttgaagatgcatttgtgggggaagaacctacactaggagggcagcaa

SEQ ID NO: 9817 - DNA, 802 bp, Zea mays
cccgtggttgctctaacatcgacctgcaggtaggacaaacactggctaccatgctgctgcctggatgggcttggaaggttaactgggcccttgcctagggctacatgtatggggccacaaattttcaacgggggtaagccaattggggagccatgcctacgtctgtggccttaggcccatatccttcctggctaaaagcttcattctttcttaactattgtttgtttcatggcaaatataaaagtctccatcttttttcttgctatccttattagctcagcagtcagcactttttattatcctttggtgttttgtgtcaccatcatttggtacctgagcttttctatagttgcatttttatgttgtgtcaagcacaatttttgtaggtatagaagtacgtgggctttagaattatgaagagattaattttgagcccctttaatcaagtactcagaatcatgttaatacccattataacaaacacaacaactgcaatgtctgactataagcaccaagacctttgcttcacaagatagaacacttatagggtagggttttgctgttttggtattggagataattttcatggcttccattcagatgaagttgcatatctcttgtatagacaataaaagataagccctaacaaaagtatgcactgaaaacaacagctcttatgcttatgcccaagcaaacttggatcaaatcttgattggatctatatggtcccatttgccagcatttttgtcactaatactaactgcaaatggaaccacatgcaatttaagcttgactatagctg

SEQ ID NO: 9818 - DNA, 745 bp, Zea mays
acttcttccaaatgcttcaagaattggtgggcaggcaggctggcagacgggttggaaacaatcaggtcactgcgaaaacattatctggaaagcagtgactgttcctggcacttggttagagtataacatgcaagacttcctcagcagcacgtttacagaattgcaggaggggtccggccatctggtcctctcattttttccctgggtttagtagactagcttcatggctcttgcttcgtatgatgggaaatgcttgttgtgccatatgatgcaacctttcaggataagataatgttacttagacataattgagagcctgctgttaacgtcgcacagaaatatcaaccatctctcctgtttgctaacagattgtgtgttcttaccagtctgttcagttgaataagagaatttatatggtcttcgtttatggataaaggcaatgggggcatctgactcatgataccaggcgtttcgctcattctgaaacagagtacataagaatagacgttaacatcagtagtgccaggtctcaactcaatgttgtaatcaattgcagaaggtttcaaaactcaatgcggtacctgcttaaaattgttttgatgttgttactcgtgcggagaaaaagatctgtgttctccactgtctgcaagaaaatcaggcatgaaaacagttatgatcagttgggattacttaaacttattcatggttttttttttttcttaaaaatggcatggggaaagcctac

SEQ ID NO: 9819 - DNA, 747 bp, Zea mays
tgcagctccgcaacctcttttcttgcttgcacaagctgttgttcgtttgcactgaaagcagaagatacttgtgaagacaacaccttgaattcctcctgaagtcgttctgcggtagttgcattattccatcttatcttcctcagagaatcctcagccttaatggcccgttgctcttgttccacctttgcactcattatttctgctatgtcggcctcaaactttttagcctgtgtctggagttcattatccaagctctccacattggcctcaagatcacttataatagccaaatgagctgaacactcatattgcatccttagctgctccctcagttgtgtttgctccagcctcgaagatatgtcatggttctcttgctttagaatctcataatcaagtgcaagttgctccatttgcatctcaatatcctcacgatctttcttgtacaactcgatttcattgctcagctcaaggattttcttttcaagctcagaggtagagatgtcatcacgcttctttgccagtgcatccagcataagctcatcttccttctcttggtatgaactcgtttcagataaggcaattttgcgttcagaattatgcacatttgacagtgcatgctcatattctgcctactgtggatcctcttgtgtatcctcttgcaaaatggaaatgtctctgttcttttgctccaacatctcatcaaggatcttttcacaagccagaaagcagcttcaaaagttaggattc

SEQ ID NO: 9820 - DNA, 791 bp, Zea mays
tgccgtctgcaggcctccccgtccgcgcgggcggcggcgggcaggtcccacgccggggtggagctcgcgctcgacgcgccggcgccggcgcctttgcctccacctcccaggtacgtggccgggggcacggccatgtcgtcctgcacgacgccggggcggtagtagccgctgcggtacagggaggtggcccggccccgtggcggcggcggcgacccgccgcgcctgtgctgcgcgccgtgctggcggtggtgggtgcccgacagcttcagcaccatgtccttgagctgcacggtgcacaccaacaacaacatgcactacgtccatcagccgctgcctggtggattaagattgcagcttgtgctgtgtggtcaccagctacgattcagatctcatagtagaattaataagtaatatggtcagcagccacattcagatttcagagtagaatggtatgatcacaagagctacaccatctcaggatcaggtttcagaattcagtcgagttctcggcctaccgccatttgaccagcacctaataataggtaactatcagtaacaataatctctgatgttcagttcagagcttatcagaatgtcatcagtcatgctgtgtgctcacgctccatgtataggggggtaaaaaagtgtttgttctaccatagggatagggtaaaaaaaaaacacaggtttgtttggaggtacggttagggcctaacactaaccaggctgggccccccaaaaccaggatgggatttctctgttgggggcatgggaaacggcttttcgctttt

SEQ ID NO: 9821 - DNA, 733 bp, Zea mays
aaccgagtgccctctgcgcgggggcgacggaggccttgagggggaccctgccgttcttcacccccgccgccgcggcgtccaaggcatggagcctcgtggcggaggaaggcgggaagctgcacgccatggagttgatggatcgacgcgctgatggcgcgagcgcaggttgccacgaaggtaggtaaggatacagagcaacaaccgaagaacgccgaagagagtagggagagtatttagttcctcgtgtgctatatcaaatcaattccccattttctagcgtcaacggtggcgccgcctgtctccgccacagaaaataccgtgaccggcgagcggagagttggcgcggccgcggcgcaccacatgttcgaccttccttgggatctagcggacggcggggccacaaaatatttcttttctggaacgaccaccggccttctcgattggacgccgcgtcgcgtgggcctaaaatcaacagaaaagggagcggcccaactaatatttggtcgccgctcgctcgctcgctctaggacgtcggaaagccaccagcccagcccataccgacttttcttctccccccttcgcccccccccccaactaaaacaatggtttagaccgaacttcctcactttttatctcaagaaccaagacaaattatagtaaaccgtctttaacacccaaatatatttggtaacggtgtttcatttttccatctgtcgactcccatctactacct

SEQ ID NO: 9822 - DNA, 875 bp, Zea mays
ggcccccttttgagttaacctgcaccatcaggggctctgtggctaatctctggcatctgaggctcatagatacgatcggaacttttttggaagaaatccacacagtatttctctttgtcttcttcggcaggtagctcgcctctgtataatttttcatacaactctgctttcttttctagagcagcatagcttgcagaaccgtctttcacggctttaagctccagcttatccctgtgcacaaagcgcaacggtagaggaggcatttagttctggtcaatactcaaaactcaacagcatgagaaaaaaggacttatggctacatgaggctgaaaacagaagacagttgcttacttgcattgaaaccttggcagctggaaatgcagtataaagaataaaaaaataggactaattcgaatggaaatacttaaactgcaaagtaatagaaaattgtggccagggtagcagttacctgcacggagaaagagaacaacaccatattacttttcatataaaaatatatttcattctatcttttgttagtttatttaaattctaaactgcaagagaaaactggactgtggtttggataaacccaaagttatatgacatagctaacaacagctacattgttttgttttgagttggtaattactaagaaaatgccttaaaaagtgttcacttcccaattcaataaacaatgtgaatcacattccctgaaatcatcaagttgcagagtgatcaaggtcaattagtgctcgaccatcctattggagtacacgaatttacaaagtaacaagcatataacaatgatgacgaaatgcttcttttcctaggtttctatatgctacataaaaaaatctttcgtaaacccaaac

SEQ ID NO: 9823 - DNA, 792 bp, Zea mays
tttgcatgcctgcagctgctcacttcgctttcggtccggaggcgaagggggcaggaatcatcattgcggccgcccggctggacggggcccatcggcgccgtacgtggggcgatcaggtgcgttcgaggcggcgccaacggctggaagggcgctgcaaaaggacgtgcgggtccatagggggaggagtcgtttcagcctggccgaggataacggatcgagattacgtgtggtgttaatcgcgacggggaatcaaccgagttggcgtgcaagtagcgtcacgcagccgtgctttgggctaggaaattctccgcctcacggaaatggctggaggtcgaatcattgcctaaacttaataatattcttcttgttgttgtcgtcgtcgtcttgttgatatcattattgaaatagcgggtgccgtattattttttagatgtaggtaaccagtcttatttccctttaaaattacttgacatgcaggtaaggatgtcaattttcctgtgagagccgatctaaaatgaggcgaggatgagggtaaagcgaaactagggatgacaacagtaaatagcaatagctccttatcttacggggatctacacaaacgatatgggggacgtttctttccatcactgttcgtcgagaagattaatctatgtcgggaattctcgtcccggtttaaattataattagaatatacatcatttgttattaaattaaaatattgtcacttatacacattatgggaacgaaagaaaatcattatttgtgcatcaaaataaacgtatttgcaaaatg

SEQ ID NO: 9824 - DNA, 527 bp, Zea mays
gcatgcctgcaggttgtccatggaaggtgaacttgacgaatctatcctgttgctctttaggtacaccaaagccctgtagtaacccaaacacaaattgtagacaacaaataaattactgttctgttggtgggcgcaacagaaatgtgtaaaggataggctattttacaatcatggatgctggcaacattcaagttagtttagtactctcaccttaaaaccaactttattaccgagacaggcctgccagtctgatttcatatctttcagagcaacacggtcatgaggtctatattaaaaatgataaggtataatcatattcagaaaaacctatgtgtagcatgataagatcaagataagcataggtagcaaagaaagttaccttttcgggcctgaaacacatggttcaacgtctgctaaatctaactctagataagatgagtaaactctttctgtttgagtctgacactacagttctgtattagacatatgtttcctttggtatcagagatagtgacaatgatgctaac

SEQ ID NO: 9825 - DNA, 524 bp, Zea mays
cagagcaccgctgcttgttttgttttctcatttttacaattgtgttattcactggatcataataatcagtctgccttaccctgtttttcaggcggttcaaagtcgacagcttgactactctcatttcatatcacttccattggctttacacccagatcttgtcaacaaactgaactacttccagagttcgatccttggtgaagaaaacagtgacaaagatgggagccaaagtgaaggttctattgatgaaatggactatgaccacaagcaagcagaagcaaaaatgggtgccaaaggctcccaatcaggtctgaaacctttgctggtttgcataagtgctttgcgtcccttgatggacttattcctagagtcaataccatcaatttatttatggaataaaataccttgtctctacgattctacctaaaaaaacatgttcaacacttattttgtagcttaagagcgaaagggcctctagcgtaatggttaaggctttcgagtagcacctccaggtcccgggttcg

SEQ ID NO: 9826 - DNA, 890 bp, Zea mays
tcggtacccgtttgatggtttaaactcgacctgcagacgaacgccaagctccagctggcgtcgtacgtcgccctgttcctcggcgcggggctcatgtcgttgctcgccaaatgggcgtagaacagaacagattcgctacccgtcagttttttttttctgccgaatcaccgtcagcgagaatttcggtgcgcagaggaagcgaggaaagaaggcccggatgttttgtatgtaagagcactcccaactctgctccgtggtttccatagctgccacctagtcaaggaaccatttatagaaactaatcttctcaatgcaaatggtagtttctacgcatagaacatatttaatgacttcacaaaagaagcagacttcgtttctcagagggaaggggaagaaaacgaggatggaaaccaccgacggggctcaacgctattttggtcgtttccatgctcttttcacaataaatctcttgccacatcatcaaaaagctgatatggcagtctaataaattctataaaaaccatatgagctggagagcgttgggagtgctctaaccgagttctagggggatgaagcggcggagtagtttggccttcaacgatctttggggcttaaataaaagctgcacatacaaaggggttcgatttttttttaggtgaactgggcttaacgggcaattgcataattttactggtaaattcaccgttaactccgtctttttttctttgatcagtaataattgctatgttcataattaatctcctccaccctgtaatacactgtaacagcgctgataatactctaatattcctgttttcaagatgcatacttgatactaaaacgctgtagaattactatataatatgaatctatatctgcttctacaatta

SEQ ID NO: 9827 - DNA, 800 bp, Zea mays
catgcctgcagtaaacagcatcacaaaatccgcctgcaatgcaaagggtgccaatatataagagggtgcatgctcagaggtggagatggaatcatgcaaacatagatcaagaaaccacgcaatggggagcagcaagagagtgcccccgtaccttctgctggtgctgctggccgtcggagccgccgcggtgagcgtcggcatcctgcacaagatgagggagcgccgcgtccttgctgtcctcctccaggaacgcgaccagcagctcatctccttccaagtcctcctcgaggtaccgggtatgcatgactcgttttcatgcatccgccgcgttcgagaatttttttttttgcatgaaccacaattgtgcttctaataggtagagctgttgcttgactgaatacatgtgttccctgtgcctgcactttttggccgactctgtcagtagataatggataccctgcttttgtcacccggagtcctggactattaactactccatccgttttttgctagatacataggctttgcgacgtacctagattcacaataaaattgatgtatttagaaaagttaaaatatcttaaagtttaagacagagagagtattaattaagtactctcaaacaatatgccaccacttcagtttactccctttattcaacgaatacaagcaagaaattaatgctcatagtatccatctgaagttctgaagaacatagttccacctgtatgaagacctacaggacacctaataaaccactctatacaaatacaacactgtcaaaaaaggaatcttgtcaa

SEQ ID NO: 9828 - DNA, 775 bp, Zea mays
cttgtgactaccgctttctcacatgcgatcacatgcgccgattttatggcaccaacatgcttggtcagtggaacgggccggatgcatgtggtgtcctgtactgtactaggccggtctgggcccgcactgttgatggaccagacaggcccgcccaggatatttctggttggatgtgcttttagtttggaggaagtagtaataaaatggatgctccacttggtgtgccgcgttttcctgtactggtgtgtgacgtgttactgactcaaacaatgcactgtgttatttactcacatgtgatgggctcggtgacaatggaggagtggtggtgcgagtggtagcgcgagtagaggaagtggtggtgcagcgcccggtggaaccagtagtagaggaactccacgggcccggcgtggagcatcgccatcgacacggagccgtccgacctccacgccggcaatgcgcctcgcgctggggatcgccaggtaccccacgtaaaacaacaagccgttgaggatgatctggtcgtccctgcaatgcacgcatgttcgtaagccgggcggtccaacgacagcctagatagctattgcttgctttgctccagtagtaatttttaccagacgtcctccccgtcgaccttgttaaaactcgatgccgccgccaactatacggtgctttgttgcgcgcccgtcttggtagacgcgcgggggctttattcccagaatctaggtttggtgccaccaattcccggcaggcaaaccaaccgaaccggtcaagggaa

SEQ ID NO: 9829 - DNA, 764 bp, Zea mays
tcgacctgcattaatcccctgcccaaggtcgtgtctttttcatgactcttctgtccaaatcttgtttcaccgtggttttcctttcttctctccaggaagagcaaaagggacgaaaagcagccagcgttggcaagcagccggcccatgacaaggttaggacttaggacgcgtgctagctgttcttgcgctctggcatttctcggaggctatgatttgatctgggcactgtttgattgtttaggaaattcgccgcctccttgacgagcaagggccaacctgaatgtcagccgatcgtaactgatccagaacccgaattttgtcaacagaaggaatcagtaggcgatggcaccgttgatattgacgtggaactctacgagctggtcgacgatagtgatagtgacatcgacatggtacttgtacttctaatttgtgttgaccctcagaaagggatgggttttgggcatctttgacatggctctgggctctggcttactgtcatgtttcgcaatgcagggtgcgacagagaacaaggacattatgaacgaagatgaattgctcatggatattgacagtgcagactcggggaacccgcttgctgcaacaaaatatgttaaagagctttacaccttttacagagaaaatgaggtgatctatttgtcagacgatgtttatcatgtttctttttggtagaaagtctcaaatcatgaatcatgtataacgtgcttataaagattgacaagctccttgcaaaaccggattaaatt

SEQ ID NO: 9830 - DNA, 732 bp, Zea mays
tttgcatgcctgcagtagctggcattttagaattatttagtttggtttgggccatttggagcttattgtataatcttttggcttggtaataacggtttgggctgaatagcgtcatctaagttggcccgccagcatttcctgtccaatcaccataactgttattgctgagattaacacaatattctcagtgctggctttagttttttttttaaaaaaaataagcagtctttggcatcttaatttgtgtacattgctttaggtgattcttttaaaagagagctttagttgtttttttaatattgttttctgctttaggtggttcctaaccctgagatttatgtgacctttcaggtttggttctttctttgcttcctggttccttggcaccttcttgatggtatctgtaattccccctatactccccggtccaagaaacttggaagtgagcaccgcgtgtgttacttatgtgctccttttcatatcgtcgaccttcttgaagtaagagatctttgtgtttccatgttagcgcaaagtcttgcaggagttataaacatggtatcatgcttcaaatagcttgtacaatccatcggctttttctttgcttgtttcacgtttatggagctggaaatgctagttctttagtgagttgatagtagttttcaggttgcaatgtgagatgtagaacgtttttttgcctaggcccgtgatatcttgagcagggtctaacaccta

SEQ ID NO: 9831 - DNA, 778 bp, Zea mays
gtatactctagaggcgagctgcagcttcttttcttggcctccttccggcttctcgtccttgtagtcttgggtgagcttttattctcatttttcgtatgcgtttatttcttctcatgtttgcagtatttgagcgggctggtttgaccgtcgttttgtacccgtacttcctcgaagctctggctggtcatttgttgcttgtactttgtacccgggatgcgcatttactgtgtagtagatcttgctttctttgtgttgcttgaatcggcttaacgagtttttttgtttgattttgtggattctgttgatgctaattgctgctctcgtgctgaatcagggtgagatcccaggattcagactggtgccattcgatttgattttggcgcggggtactttcctatggccgcctccatcgcggcctcgcccttctttccagggtcgccggcgccggccgctcctaaaaacggccttggggagcgcccagagagcctggacgttcgcggcgttgcggcgaagccgggagcctcgtctaatgccgtgagggcgcgcaagacgcgcgccccaagctgtcgttcccaaaggtgaaacggtggcaagtctcgccgtggcggatgtggagcacgaaaccgttacctgacccttcgtcggtgccgagggcctttctaccaaccagcttcccgactggagcatgctccttgctggcatcacgaccatcttcttggccgcgagagcagggacgatgcttgattggagcccagcgggctgcatgctactgacactt

SEQ ID NO: 9832 - DNA, 887 bp, Zea mays
cggtacccggttatcctgtagagccgacctgcagcgtgttcagaatcaagttttcctgctcaatcaccaagacttaacgcttagccaaaaaatcactgtaaagtaaaaagacaccatgctaggatacaattgcagaacaaggagaagacagcatgcacgggtataaaaaaagacagcatgcacgaagacagcaaaacagggagaaatcatccgaaagattacaattgacacgttccacttatgtataaaggacacaattgcaatttttcagcaaaagatccatatctgctgtatgctgatgtagcatacatggatctatctatgatcattgtacgtttagataatgcagtattaaagaaccaggcatgcattcagtatgagtgcaaattgcatttagtgggattaccatttctaaaatttgcccttttgtgtaggcacggtcagatatcagcacaaggtcctcaacaactggaacagatacctcctcatatttacaagcgagcagcatagctgtgactccaaccaggtgtagcttcttccttggaaccacttgcttttgcaagaatctatctattatgtttaccataagacagagcgtctcatccatcagttcagacttgtagtgaacctggaaaaatgaccagaaaaaatattaaaacatgttgtttcagatcagaacaatttgtacggtccatgcttttgtacctcaatcagccagtcaatcagaattgctctcatctttgagtttatgtcttggtggcctggacatgttatttgggccttacacaactcttagcctgcataaaggcaccacattggtaatactgaaaagataatagaagctgcaataaaaaatcaagataggagaagcctaagtctttgtgaat

SEQ ID NO: 9833 - DNA, 748 bp, Zea mays
gtctgcaccatttgcgggtctctttaaaaaaagagagaattttttttatatatgacgttcaaatcttcactcatttcttatatggcattcgaaatcatgagttttcttcgttgccatcggtttaagtgtggcactgccgaggtcaatagttgtacagttctagaatggcgtccgtattcatttaaaataccgatttttgcactctgcttggtagtcccccataatggcgatgttctgagaagcctacagggccacaacggcgcgggataggagcattcggcgttactttgtttttttttcttgcagcgatatgcgcacgcaactaaacggatattttgacgggatctaacggcaatgacagctaaaggaaccgaaaatataaaaccagtgggcagtggcattgagatgagctcatatttttaaacggtacataaggaaaaaataataagttttggtggtatataagaatttttctcttaaaaaaaccaggcatgcgattgggattcctccatcggaacaccggagaaatctctcgctttcgggtgaccattgggaagcgcgccgagcgcgcgaaaaaagtaccatttgctccatctttccaacccatcgagacccataacaacctggaacactgccgggggaaaaccaccgtgggttcatgattaaagggcccctactatgctaagggtaaaggggcataaccccttttggccctttaaaaatttatattatgtacctcccccactaa

SEQ ID NO: 9834 - DNA, 732 bp, Zea mays
gagttcctttatagttgtcgtctgatctgggtttgaagccaccgccattctctttcatttggttgatatggctctctttctccacaagagctgcttccaattctttctgcgtgttggtaagatatgtcgtggtagtttctgaatccatgagcttgtttttcaattctgccctctcaatacttaggacttttgttttggcttccagttcgtccactttcctcctcatctctttgttaatttccttttctttctgccaaaaacaagacagtaatatttggttgatgaggtgttcttgaataacatgctggatagataattcatagaacacaattaaaataaaaaggcagatagaatgctctaaagtgctacagctattgcagtttacattatcaagtggactgtacttactggcagaatatttccagtatttacttgcagaataagaggatgttcaattagatatagcaacttaggccatctccagcggatcctctatatcatcctctatttcaaactttactctgtaaacagtgtcaaacagtgttatctacaattccgtgttccctattttatacgattcaccaaagacaaccttagttgcctacagataaatttatgtctgcaaatagtgtcaatattgaagtcctctcaggggcgatttattatgtggactaccttatgactgcatgattctatgtttgatagtatcttcatgctttgggtatggaaaga

SEQ ID NO: 9835 - DNA, 776 bp, Zea mays
tgcccgttcccggggaccctctagagccgacctgcaggtggcttattgtcggtccgacagcttttccagcttcgctaatggggataggctaccaaaacgtaggctctgcctgggcctacggagcatcctctcatcatcaccatcagaggaggaggacatccgaagaaaagggtgcccagcaactgcgtccttccaaacccggtccaaaggcggagaaggtcggtctcagacatgaggcggtggacggtcggagggccgttgaggagtggatggtcgactacgctctccggaaggaagtcaagaggctggctcgtgctcagaagaggaaagttgagatgcttgtccaggccttcgaatctgttctgcccacggtagcaatagcaagcgagaagaagcccgggcaacacgatggccttcgaaagcatgcatgtagctgacagatagatagatagaatcatagatagccgacactcatcttgagtcaggtagtagtaggacgtgacaatttgagtcaggtagatgaaacgtttcaattcagtcaaacactagtcacaacggatacaaggtttgatgctccaccaaccactgatccgttgtgaacttgtagtagaagcaggccaccgctggcaatgtggcatgccatgccatcaacctaacatggaccattctgaatgtcggctcaaaacgtggcaaaatactatacttccacatgaagaccattgttcaggaagatgacagaattcagggagagaaaaaaaaacattacaattggttaa

SEQ ID NO: 9836 - DNA, 771 bp, Zea mays
ctgccgtctgcaggtcgacttttatactacggctgggtattttgttgtgaaatgctacctgtcatcatatagtagataatagatatatcaaccttattatttaaactcagaagtatatttagtcaaacattatttgttattgagaatggcgttatttacatcacttactgaatttttctcatgtggttcgttcaggtatccttttgaggctataaaggttgttacttcagatgggtatgtcgtgttactggagagaattccaaggcgaaaatcgttgactttctcgtgttattttatttcctgatatttatggatcaaaacttgatgcattacctttttaggcgtgattcgcacaaggttgttttgttgcaacatggaatattgcactcatttatggggtgagtgatggccaaattactctattggcaatgttattgacatctccacacaagtgacattcgctgcagtttagcgagtttctgattctttttgctgatacccttttctaccatctgtatggaccaaaacttattagtttcgccactttgcgagcatgttatataatctattgtttcaaaaaaagctgtattgagttgtctaattgtatggacagtcagacaatgtaagacctctaacaaatggcaagatcgtctatactactaggattgagctattatagctggtctccttggttattgggttcctggtttagctaaataccccctaaaggttaaaaggtcttattgccccccacatctaattctttctttt

SEQ ID NO: 9837 - DNA, 716 bp, Zea mays
ctcggatcccgtagagccgacctgagggcgaacacagatagacgacggtgtgatctgctccggtagaacattcaccttaggcgagaacgcggccggctgcaaagcttggcgagtatggagtaaaacttattttttgagggctgccgcctttggacaaatccagtaaactcaccgagtttcggaaatgtgggactgagaagggacggcgatcccagatcacacagaggacaggggaaaacgaagccaccgagcccccacacgtcgccatccatcgccgtaatcgatcaccgccgtctcctcccccacacacccaccggaaccgtcgtcctgacctctcgccagcgataagcaaatctcctccccactttatcgtccacaaagccttcttcccgccctcccgaatcgctccctctctgtccctgcgctccagccgccgccgtcgcctccgccccccgaatcccaatggcgtccgcggccgcccctccaacctccctctccctcgcggcccgcgcggccaccagggcagccgccgccgccgccgccccgctgcgcaggggaggcctcgccacggcgtgccagccggcacggtctctggctttcgcggcgggcgacgcgcggctcgcggtccacgtcgcgtcgcgatgcccggaaagcgttctccgggcgttgcacgcgggcccatggccaccattgcgaaaaagagcgtaggggaactc

SEQ ID NO: 9838 - DNA, 678 bp, Zea mays
tgctcgcctgctcctacagcaacgccacaccgcttctttttttttaaaaaaaaaaacagagagatagagagaggtccggagatcgcgttcatggtgagtttgctggctccccctttgactctggagactgaaaccctcccatgcttccagccttccacccaccaacagaaggtgaccggccgcacgaatgctagattgctagtgcggttgaggtggactgaagcagagccagagccagccaagtgcaggcagcgaaacagagactttccaactccccactgacgaatgatgatgatgggtcgtcatgctctcacgcacgcacccagaacaaaagattcagcgataagcagtattgacaagcaatgaagcagcgtaggttcgaagcttggacataacccatattcaaactacactttataaataatgtaatataaaatataaaatagtgtaaaacaatatttttgggtgactgaactgctgagagatggatatagaataggactaggagatactgatgcgcagttaggtttctggtacactgaactgaacagtgcagggctccatcccaagccccgcgacaattttatcatttggtgtgagccggtcggtagtagctggggtttggccaggcgtttaggttgcgtatccaccgccggcgaaaagctttggaattttggg

SEQ ID NO: 9839 - DNA, 1398 bp, Zea mays
ttccaacaacaaattggagaactgcgaaggcatcaagcacaaattttgattatttgcttatctttcatccaagccacttaccctggaagtcctaaagacagtgctgggatgcaatcagggaagaatttataaactgctgatcaaccccaaagtcagaaagcatcaaaattttccactaatgattcagtcattaccttagtgactatgatttatagtactataatcacatttaatgacttcaagccaattctctattctctactactataatgtgggagtttctcccttcgtacgtcacccccctccccacgcgcgaatgactacaattgtcatactgctaaatttctaaaaccctaaaccctactgatggaataagtcttgagcatctagaggacagcctgcttttgactgtcctctgtagtcctttagcatctagaggacagcttgactgtcctctgtagtccctttagcatctagaggacaacagtcgctttttgactgtcctctgtagtcgctttagcatctaaaggacaacagtcgcttttgactgtcctctgtagtctctttagcatctagaggacaatcctgttgtgtagtgtgtgtgagaaggtgtggtagtgcagcccctagggctataaatatgtgtccccaaccccctctaagggtatggcattgtgaagtggttgaggaaataaacagaaaattgccccaactcataatgtcatcctctcgatgagagtaagagtctcgttgcttacacacacaacagacaacttgggacatgtccagggattacccaatagtgataggggaaaaaaccataatggagtactcagttactcaccatggtccagaaagtccattcatggaaaaccccatatttccttatggcttctccatctggtgaccgataggtacttgctaacaagcacacacttccaataaatgacatttctatagtcatcatgtaagaggtatgctttttaacctgaagcattagtgaacatgttagtactagccataaactgcatcctggaaaataacaaggtacgaaagtccaacctgagatgcccactgacataatgaagaggccaaaccagacagcatagaagcgactgtaaccggaatgatcccatatagcaagatatagtcagagccaccaccatttgaacctttgctagtactctccccaacacttaaaagaacagcggcactaatttaagagggccaatgctaaaatttgcttggatgattgcttttgcctgcacaatgttgcaaaagggaaatcaaactatatgagtgctgggaattactaagtccaggatctggcattgatgtttgcaaaaggaaaatcaaactactgagtgctggtaggttgtttggttaatcagaagagtt

SEQ ID NO: 9840 - DNA, 740 bp, Zea mays
tttgccatgctttctttcactaatactgtttcctcgtatctggtttgaagaatctgctgggccgccggcacggagactactctcgacgactctggaatgggcaatgtcgctcttgcttaaccacccagacgtgctgaaaagggcgcaagaagagatcgagtcgaacgtcggaagggaccgtcttctcgacaagaacgacctcccccggctgccctacctccactgcatcatcagcgagactcttcgcctctaccctcccacgccgatgctgctgccgcacgaggcgtccaccgactgcaagatccacgggtacgacgtcccggcggggtcgatggtcctcgtcaatgcgtacgccatccaccgggacccggcgatgtgggaggacccggaggagttcaggccggagcggttcgagctcggcagggcagaggggaagttcatgatgccgtttgggatggggaggcgcaggtgccccggcgagaacctcgcgatgcgaaccatggggctggtcctgggggcgctgcttcaatgcttcgattggaccaaggttggggatagagaagttgacatggcaacagccactggcaccatcatgtctaaggcttgcccactcgaagctcaatgcaagccgcgagcgaacatgtctgctggtcttcagaaaatctagagtgagaattgtgaatattttctagttgccagataaaacgaataccataaccttatgccaatggctttattat

SEQ ID NO: 9841 - DNA, 724 bp, Zea mays
gacctgcagaaagtgaccagtaaattcattgacaacttcatatatttcaatgacttaacaaatgatacggttagcttgtgaaacttgtaatcaggaacttacatttgtatctgtgagcagtcccagggaaatcagtgatgatcccgtccaccttagcaccttgcacataagcattaatctgtgaagtggcgtctgcgaagaagtcattcggctgagatgcaaactcattcatgagcacatagacgtaaacttggaggcccgcagactgaagggacgtgacaagcttattggtctggtttgtcaaataataatgggtctgtggtaaaacagatgtggtgctaacagagacggcattagcaaacttcttaatgtctgcaagggatgaaggtgcggcatctctgacaccttcttcaatcatgtagacaaggctgtacttggtttcctgcttgaacttctttagcaccgagctgttggttgactgaatcataacattctgggcagtctgtttgctataaccagagtcatcaagtgctttgaccactgcgtctaccactccaaatccaagcttctctgccatgaatgcagcatgctgcaaatattaaaaagagaagggagaatgaggtgaggtgaggactggcaagaactccaccaggagacataaaaaggggattggatttgcttcagtaatccttttgtagagaaagttcacagatttcaaaccatt

SEQ ID NO: 9842 - DNA, 755 bp, Zea mays
cttgcagagagattccctccggcatggcatgtctgtcctaataactttgtggagtcctcgaccacgctgccatgacgactgtgcggggagatttgtggggggaatccttgctctcccggaacacatacgagagttgttgatacggtgaaccgttggactccattcggagactgacaacacacggaagtcccgacatattattgtcttgtttaattaaaagttctttttgggtctccaaaaattatgtacatctttaaataactatctatttttgtaagatctagcgccatagcccttgctgttttattatttttaatactatatttgagtttttttttaaaagtagtatgaccctaaaatagtttccaaatatctgagagaaacgcatctaaaatccaagtttggaaaattattatatacgatcaagtgaaatccgaaggttcaatgacaaagcaactactcaacattagaaagaagaagataattcttccgttctttatttaaaaatgaactatctgggtcaactatccccccctcccccacgggccacggtggaggcccggaggaacggcatcatgggccgaccggcccaacgggtctttatcctctccgctcctttcgacattagaaatccgtaacaattgttacaagtctgaatttactaaccgtgacaaactatagcatggtttcttctttcttgcctaccacagaaagagaagactggtgatctgaggaggccacgaaactaaccgaat

SEQ ID NO: 9843 - DNA, 678 bp, Zea mays
gcatgcctgcagagcgcggcctgtcctcgacgcgcgcgccctgtctgccgtcgtggcggcgctgtgccggcggtccgtggacgcctgccgctgggccgacggctaccccctcaacgtgcacctgtacctgaccctgctgcgcgccgtgttcgacgccagggacgagacggtggtgctggacgaggtcgacgagctcatggagctcatcaggaagacgtggaacgtccttggtctcaacgacaccatccacaacgtctgcttcacgtggctattcttggagaagtacgtgacgaccggggagacggagccggacctgctgtccgcggcgctggcgatgctcgagcaggtccgcgacgacgcccggagacaggccgaggccggcacgctggaggcggcgcacctcagggtcttgtcggcgactctggcgtccatgcactcgtgggcggaagaaaagctgctggattatcacgagtcgtttggtgacgaccaaggagctggtggctccattggtgccatggagaatgccgtgtcccttgctgtcttggcggcagcgatgctcagccaggacgtgccgtcgtctttcgcagtggcgggggcggctgccggcggcgatctctcgtcagctagatcgccttcgtcattctcagcccaggagaaggagatagtggaacccgtata

SEQ ID NO: 9844 - DNA, 541 bp, Zea mays
ttgcgtgcactgcagcttttataaataaaaactgaaaactatggttgcttctacggttaaatcacaatctaaaggcctagcagctcgcttgctggcgatgggagtagcattgatatttttttcatcatgcgggagtaatcccttaatactgttataactttagtatacttagggaacaattttcgatgccaccggtgctacgtagcagccaccagcagagggatggtgtagaatcaatgtggcttgaattcatagctggtgcaacctggcactggcgctgtagaactgtttttgtacatgttgtatacagatgctccttgaccttaatcatctcatagcaaattttgttgggtgtactcactgttttgctgcctaagtttggtttgtgtgtacaaactagaatttaaacaataaaagcatgcaggtggcaaaaagtcatgaagaagccttctgatgaaccagctgtatccgaccatatctgacaagttattagtatcagccactggcacgtgtgtgaattttagcaggaccatactagtta

SEQ ID NO: 9845 - DNA, 848 bp, Zea mays
ctctcggcgtccctacaagcgagcgattcattaattactagtctattactgtcattgcaattgaatggttagtttttctctctctttctccggcacaaaggagtgagctggccgtcgtttcctcgtgcggcactgattgcatgcctacgcggtacggtacgactcgtcgctcgctccctacgaaaatccatcactcctatttctatagcattgatgacggcttattctttgtacctctagggctggctgcactctagcctatcattccattccatcccattccattccatcagacagcatcagagattccagctgcatactttactacgtggcccgaaaatctgccggccgcgcctgaagggatggggaactgactcaccgctccgtgctgtgtgcgcgccagagccaccccactgcgtggagttcagtcagtgcagtccagtgcagtgcaacgctccccgcgcaagcgccccggccggtgcctgatgcactgcacttgagtgacagcgcacacgcaccgagtgacggacgcaacaacattacaacaacaacaaaaaagcggctgggtttgggcgtttggcgcacgtgctcgtgcgtcgcgggaccagcgacagcgacggcgacggcgaaagcacgggccctcccggtcccggtcgagtcgggacaagcgaggcccatgcctccccgcgccttttgtgcgacgcctttcgtctcggcgccacgcgcgcaggtcgctgggccatgtggaggcggaagcgacggaaacggactgactgacggacggacggacgaagcagctcagcagcatcagcagcatcagcagcacagcagcagcgtgtgaattgtcg

SEQ ID NO: 9846 - DNA, 652 bp, Zea mays
cgcgcggcgcagacaaccagtgagcgggtgccggtgccggttgcgcgcgaggggacagcgcgatggctgacgaggcccgcgcggcgtcggcatgcgtccgggggcggggacacacctcataattgcccgaaaacccacggcccaatcacgtctggcgtgccgtgcatcccaatccgcatttataccactgcgccattccgtactgtagctttgcaacgttccggccgtgtgccggtccgcactctggtctggatcgacgtacgtagcccgagtcgatcctattcctagctagacaccttaaaaccttcactaaaactactagaacggattaagggcctgtttgtttacccctcagattatataatctggattaaataatcctaagaggcaaacaaacagtccagcttatttgccgagattatataatctaaccccttggattatgataatccataagcaagtgaggaggtgcttatttcagattatttttttcccacttccccactaccctttcaagtttcctagaaattacccaccattgccattataacccaccattggcattattgtcttcctcatacaaaagaatcctattaacaactcaaataatctggataaacaaacgggactactcagattatataatccagat

SEQ ID NO: 9847 - DNA, 828 bp, Zea mays
ttcgagcctcggtcccgggggatcctttaaagtcaacctgcagtccgcgatttctgagctctaactccttggccccctcgtctgcggaggctgactcggcggtgtcctccagcggccgtttcctcgtgctctacgcgtaacaaactgggaacgccatggacgccgcaaagcgtgtgggccgcgaggcaaaacgtggcggctgcccgtccgtcgacgtgctctccatggacagcttcgatcccgtgagcttcaaaacctagagccctcagccacacaacccgtgcatgtgcgaacttgacgcctttgtgtgttcgtgcagagtcgcttgccgagcgagcggttcgtggtatttgtcgtgtccaccacggggcagggcgaccccccagattccatgaaggtctggacattttgatctactagataatttccaaggtctggacattttgatccactagataatttccagtcgtctggattgcttattgggattttgggttgtatgttgcgacaggggttttggagatatatgcttcggaaggatttggatagacaatggcttgaggggatccatcatgcagtgtttggactcggggattcaggctaccagaagttcaatgtgagacttttttctgggtaattgagcttgctaataattattatatgctgccatcagtacaaaaacacttactcacacactcacaaagacaacccaaagcagaaagctacatctgactcagtggtccaacactcgattcttcccttctcttctctttttattcctctctccttctccatttccggggggttaaaagaaaattatgggcaggc

SEQ ID NO: 9848 - DNA, 747 bp, Zea mays
tcttctcaaatccccaaaaaactggtgcttatttctttagaaaagaaaaaagtccccattggaaggccaggatttgctattattttctaaccagtcatatattatctggaatcatttctcaatcctatagcaatgtaagaaagtgacatctcccacaaagtcaccatttaaaaaaactgtacattgtcaatgcaggctgcacatggggccaatatttcaggaatgcggagcttgagaaaatgcttaaccaagatctgtcccgcctataccctgaattgggggacttcttccaaacaagcacatgtcagtctatgcttggacgtgtattgttagtatggagcctcagatacccagagtttggttacagacaaggtaaattattgttgtctttttcagtcgctgcaagctatttatctcctgaaaaaatggttgataccaactacgtatagccacaacatgatatgcctaagtgcacatcaaccaagtggttcctaatcttatgcctattcaatgtttgtcactatgtggaaccaaaactttacttctaaaatggctacctagttctttgtgtaattattaacctaactttagttgagtacttctacattgcatattgaagcaaaatttgtctggcctattttaggtgactaaacattattttctgccaaaatttgtaacaacatgccaaaacctttttgaacaacttaacaagggtcaatagtggtgatactctgttctgatagatac

SEQ ID NO: 9849 - DNA, 851 bp, Zea mays
acctgcagcagactctacttggtaacttattatttctcttgccctactactactgctgtgacacactaatttcatcttgggcattttcttttggattttttttgcaattggaacaattttttaatagatattatatttcacttaggcaatcacttcggaaactgtgcttttaaagtttgagaagtctagaagccattttcaggagagtctaaggcgcattgaaagcatagtaactgaagatatcggctgtaaggtatattgtgcacgaagctcatctagtcaatatttttgtttcaccaatctttgatctttttcttttatgactttatagttttgcgattattacagtgtgtaatatgaactgacatcctgaacgtgtcagattgtggagattgttggtgaactggagcaaattgtttttacattggatagatcagagaaggaagctggtgatgagctgatcaatttgctacagagaaacaataaaacaaatggttctagtgataatggggaacttgaggtcttccatatttctgctcttaaattgggaattacatcttctagggcagcactcaccgaaagaagagcccttaagaagctaattgagaaggctcgttctgatgaagacaagcgtaaggagcttgttgtgtcatacttgtacaatctcatgaagaagtactcaaagttctttagaagtgagactggtgatgatacaaaattcttagggatcgtctccttgctcgccaacaatatttaggcggtggatgaatatgtgttagcccatacattaatgggccgtgcatttggtagaaccgatttttgagccagtcaagtcgtttcatttaaagggt

SEQ ID NO: 9850 - DNA, 548 bp, Zea mays
tttgcatgcctgcagttcccattttttttagaatcgatcacttcagctacacattttaggtgaccaatgttttctagtgatattgtgatgatatatcgataagacaattagtcagatgttgatgtagtttctagagtcagctgttcaacttgacaaagctttacttctgatccttttagtaatctattagctggattaatcagtaatcaaacctttttgagctgatctttactgaaatcaggaagaatagtgctttgcataaatgggttgtgctttactgccctggacatatttacacatcaaatttgtggtgaaagaccccaagtatttgaattcaattaattatgattaattggcactgttattggaaattgatgtttggattttaggtcatgaattatactttcatgtgttgtgatttgacttgagggttatctaatctcttgcttttctaatgctacgcctatttgattagagaaacggacagtgggcataatgccatcatagtttgctaagagcctaagaatgaggcagatgtcctaccctct

SEQ ID NO: 9851 - DNA, 862 bp, Zea mays
attccactcccggggaggcatccttcgtcatcataccagcagaatggctcatatgagagtgacgacaggtagctaggctgagaaatcgtatcgagcatcagcatggcttgctacattttttttatgatggaaacaagttctaaccttttgcactttcatgcatacagccttagtaacgatattactttttcgcaaacagctaagaaaagataaaacgttcaatgtttggagccataaacaatttaaacagcctcaattctagcataagatcaccatctatgacttgtgaagatctccatagccaccatctccaaagattggcatacattgagggcttcttgatgttattcttccttctgctaatctcgcatgctgtgtttcatgctgtctcatgctaatcccacatggcttgctacataaaccacgttaccagtgtctcatgctgtgtgtttctgttcaagcattatgagtatttttttgtattaattgataatcactaattatttaaggagttgatagaattttactcacacgtgaaatcaagtgtgtaatgcaactcgaaataccaactgaaaagggagcttagccttgtagtccttatgcaaaatgtttcttataatttcaagtttgaaaccaacatgggatgttgcccaaaaaaaaaacctttttttacaaccatagggaatgtttttcccattaccattaaattatttgggggttacttcttaaaatcccgttaattgggggagaaggctataacttgaaaaataaaattattaaagagacttttaaaacccctcgtacatccccacaaaaggggttttgaatttgaggaatgccggtactaaataccatttacctt

SEQ ID NO: 9852 - DNA, 694 bp, Zea mays
aagactcatagctggcgaaactttgggctttggtgttttcaatattgaatccaagatatcattctgaatgcggtgtggagtacattccctgaaatgataatgtcgttatgtcatgtaaggtgcctcataggaatagcaaaatggctgtcatctgaagactttataatatgtatttaactacagttattgtgaaagccttgactcgacaagctagaaacaagaagcacttgctgcaatagcaactagagagaaaggccaagattcttgtggcgcataacaaccgaacgcatgacaccgtatacacccaaaatatcttgcaaaatgtcaaatgtctgaagcacatctactttatgacattattttagacaggtgcagattataaacgcttcaatgctcaaaggagattaccatagccacataagcagaagacaactaagatgtatttgcatagtggtttgcatgaaccgatagtgctcttcacgtgttgacttatgtccatagctaatactgtgttcacgtcaagaaagcttaataatgccaacacaaatatgctaaactgtcttagatatgtcacatgaatgttcatacagtcagaccaaaaatatcaagttatgtgcgcaactcaaattgatttagcttgcatgtcccctaaacaagaaataaaaaaatgttccttacaaaagaaattgatttc

SEQ ID NO: 9853 - DNA, 736 bp, Zea mays
tgcctgcagattggcatcatttgtgggtgttggtgttcgaaggattcctgggtactacaacaaattgcttgatgacaggactgagacattggatgaaaaggatcctgtggacccagtggtcaacgaacagggaagtgcacccagaaaagttacccagcctgagaaatggaaaggacagatagagaaggttgttttcttgcaacagttcgaatttagaggaagcatgccattggttgacaacctttagtgtttctaaacacttgatttctgtttccattacaggatttgccacgaacatttccaggacaccctgcattagatgaggatgggaggaatgctttgaggcggttgttaaccgcatatgcaaggcataatccatcagttgggtactgccaggtaaattgatgccaattgaaggaattttgttttttttatctagcctcttgttggcttaattgtattgaatgagatagattgtaatcctaattggtgcatgcaaactatgaaaggtcatgtctctgatgttcagttgagcatttgagcaaaattgtaatgtatgaccttaaattttgagagatccattataagctatgggcctatgataagtgatacattttcaatcattagttctggatttctgttgatataaatgttgttttataccgtatacctattggagctttataagggattttgacataatgtaaaaccagtgaagtctatctccacataaaaa

SEQ ID NO: 9854 - DNA, 561 bp, Zea mays
ggtacccgggtatactctagaggcaacctgcaggcaaaacgatcatgccccctttatttaccggtacacggatccactgttcatcttggaccctcacatcaaagtagccttgagaacataagtgtaaaaacgattaaacatcgacagtaactagaaagaaaacctgctgactattagattttctgtcttcaaaaaaaacgcctccagatgcaaaacaaaggcacctaccgctacccttaaggcaatatcgtatctcttcatcagtatgcaagtgttcttcaaagaaattctttatcttagcctcgtaatttggcaacttctctgggcacacatcacaaatgtcctgcataaggaaaaatgcttatcatactagtctgaatctttgaataggtattgaccttgctactcaagggtagagtaacaaaacaacaagtgcccaaaaataaacttataagcaaaccatgttagaagtaccccctggcttcacgaattttcttgaggttctcatcattctcccaatcatcagcattttaggcgccagcttaatattcctagttctga

SEQ ID NO: 9855 - DNA, 509 bp, Zea mays
tgcatgcctgcagaaagaatacctgcagatcgagtctactagtactaatcacggttccaggccatcagcagcccgccccgcccatctttctcgaccttgagagctgaacgcgcgctattttttagaagggtggagtggagagtccccattggccaagcgaactcccaagtcccatcccaccatgcatgatgcatcccggaaataatgcgcgggggagcaggagcccgtgtttagtcgcagcggcagtgcttggtgttggtgttggtgatctcggcggcggcgttccaccgatccagcgcggttttagatgagcaacgagtaagataaacaggccactctcaagctggtggctacttcccctagtattttcgaccttcgtaagctcgtgatcatcatcgattcatgcatgggtttactaaatctaacaacacaagaaaaaaaaaaagaggagagtcgtctgatttggcggcaaaattaacacagcaagcacctgctgctactgcctcagc

SEQ ID NO: 9856 - DNA, 506 bp, Zea mays
agtgagtaacacgacagaacaaggtgcacgtacggtcccgcccgaccgccatcgagatgccatgtggcgcgtgcaagtgccggcaactggtgggtgccgccggctgagctgtgtgtgcatgtgctagtgctttggcgcgccagccggcaggagtaggagtaggacacgcgttcgccgcccggtatgagccgaacggaaatcccgattcgttgcacgttgtcgcttcgctgatcgtgcgtgcgtgcgtacgtggtccaaggctgcacgccccccagtccgttctgcgtccttgcgcgcgactagtcaaaccgtggctcgcgcgcttcggtggtggcgcggtgctagctggagtaggtgtaggtgccggcgcctccagctgtgcgtggaatctggggaacggaagcatccatgcaacagctgcacagagccgcgcggcgcggcgacaacttgatgctgtgccggctgcaaagccccacgactgcttgtcatgtcatgtcatgtcatct

SEQ ID NO: 9857 - DNA, 959 bp, Zea mays
ccccccgccgccaccgcggtcgcgtccggcgcacccccccgccgcgcgcccgcgccccgcacccccccccgcgcgcgcccggccgccgccccccccggccgcccccacctccccccgagccgtccccgcgcgccgccccttgaccgtcgactgccagtggcaacacaccagcagccgcagctatcatcaaaaccggcagccgaacagcgagaaggctctcaaagtcccaagcgtctacgaatgtatcaggctaatgcgaaaggggggataaagaaagaagaccaacaagggaaaacatcatatacacttgacattcatgtgagctattgaaggtcctccactgcctattgcctctactgcgccatgaacaaaacagatgttcaagtaactaaaaaaggtgctctaggcttctagcgcaaagtagtgatatgagaactgcaatatcgaccaacagtgcaccattcattactcatcctacaaggtttaggcagacaagaacccaactctcataaaaccacctaaggccttgctcgcttacaccaaaccaactgtagattaccatggattagagttaaatccatgtcataatccatgccccaaaataatccaagccttctcaaaaaaaattattcagataaccctatcatggatcatactccatggatttggaaattgtcttaactatggaaggcatggactctatccatagctcactaggcatggaacaaatccatgaagataatgcacaaggttatattagaatccatggatcaaaaaaattaactagcctttaaaaagataccatgggattaaatgatgaatccaaccccaccatggggacgagtgaggcatggatccacccaacccagacccggattaatggggggactccatcccccggaaccgaacaaagcccaaatgcggaacccagcggccatcctggacggaaaccagcacca

SEQ ID NO: 9858 - DNA, 758 bp, Zea mays
aaaacaacatggtaaataaaccaaatatgtgtacaaaattataccacggtaccacacattcaacaacaggagacatcggtagcattacatgcacatgattcacagtacaagacaatgtcacgaattttacttatacatttaagaaacattaatttttattgtagaattatgatgcacaatagcacaaaaatattcttgaaggaaaatcttgaaactatgatcactgatatgggtaaaagttacctagcttgtggagtataaatagtacgtgcagatttacgtgaaaagtaatttcattttgtttatgttttatgctgacatataaaaaactcagccggtagaggaaagaccacccccacggtattatattaagaagctcaatcagagccccgactaagaaaggtcacgaaagctagcccccgtgcagtatgagggtccgccccctatagaccagatctttactcatgctttgagcccctctaagcccctacacgaggatccgccccccatagctcaatccatctcatgtgcacacaagcaagggaaccagcgagtgaacttttttaaccttaacctcaaattcacatccaataagattcaaactcaagatctgaggagtgctactcaaaccactcaaaaaactcagctagaggcactttcacgttttatgctgacctataattatacaaataatggtcatggatgtgtattagagaaaatgctaaagtttaaatggagatgacattgcacatttctta

SEQ ID NO: 9859 - DNA, 730 bp, Zea mays
catgccacgcagcaagccagctgaggtgttggatccatccgaaccttcatggtgccagggcgatggattcaacaagcgttcgaatcggcgaacgaagtagttgcagttgcagttgcagcatagatcggctctagagttcgacgatttgtaatttaattgatgggatgattgagtatggtggttcactaatttatgttgagatttatctgtcgactgggcgccttggatttgcaggtttaagattgcaatgtcggtatagtctctactcaggcaggtttcagctaatacagacaaatttggaggtggccaggcctgggctgattgaacatatagctctagagtttcagagtttttatcttgtgaacaagttcgaggaccgttctagtttgtggcatcagattgatatgtacgattcgactgaaatggtttcagcttccggctaaactacttggattgaccagaagccggtatgcaacttagcaaatgtgatgcagtgcaacgtgctcaagaaatctcagcaaactttgttatttcttgacaagcttttctaaactcaacttataataaagcaaaaaaagaagaaggaaatgctggattctctctttagatgtgtacagggtcgttccgtgggtccagagggggtccagctgggcgggccggcagggacccttcaaaaatattaggggccctcaagtatatacttcaagtattgtattttggttatttaaat

SEQ ID NO: 9860 - DNA, 794 bp, Zea mays
tctttgtcaggcaagggaggaacagcagttgtgggaaatggcaggagctaagggtctctcctttcttgccgcaaccatcaggggcacctagctgcctggtttatcgctgatgggctggttttgtttatcaggagttgtttgtttttgttttttctcttcttttctttggtttctttatcccctctagggaggtcttttgtactttggtctattttggaccctcttttccttctacttactataatgatgcgcagctctcctgcgctttcgaaaaaaaaaactatgtatggcatccacacacacacacacacacataatgggtatgaggtattcccataattccctacatggtatcaagcagtgattacatatcgtccgactaatcgcgattagtcacgattagtcggcctgatcggttgttagtgctcgataagaggtagcgattcgaacagggtaactgaacgtccttatcgtccgcctaatcgcgatatatagcgattaatcgccgtgttgggcaatcagccgataagcgcagcagactggcagtccaaaagccattttaggcttaaatgctgtctggggagtccaaaggatgcccagtcagccagtccctttcagatgcggcctgtgtagaccaaaagtcgcccagtccaaaggacgacagcttatctgtcattaacagcagcttgagttagcctatcttctacccttcagttccttcatttctctttctacctggtttttcacttcttcttccccgtcgcctttttctggtcaaccaaccagcgagccac

SEQ ID NO: 9861 - DNA, 720 bp, Zea mays
cgtacccggtgatcccttagagtcaacctgcggatgtttgtcgactcatgcaagcgtctgaggatcatgaagagttctgaatccataggtcttggttagtgtctccagataaaactaccttccttccagagttccattgtcaagatttttaatgcgtcacctctaaccgcctaagtttttcttcattgcaaacaaaaaaaaaaaaattcagcaccaacatcttacgacaagtgcaagaacaagagctgaacaatatgcagtgttaaagatgttgcccattgtatcaaaagaatggtccccttgcagtgcgctgccgttttttttttcctactagaaatataacgcgttgctaattactactagttggagggagacctgtcttgttcaactcgttcatggaccagaagcaataatctatccgtgtgtagctggattggtgttatgtcatgtcccctaccgtgtctcccagaatctacttggtgattttattccagtgttgttaatcaagtttatgtgattgttaagtaaagggcattaatgggactattattatttattattatggtacctgtatgtggtcaagtgggtggaacaggccatgtgccaggtgaagggggaatccattagtataactctagtctatttgagttattggctgggtcttgaagcatgatggcatgatcacaacatgaagcttccttgcttcttttattgctggga

SEQ ID NO: 9862 - DNA, 754 bp, Zea mays
aagctgaaacacccgtagccatgcaaaggcatttctctattttttttaatgatttcaacagcggtaacatttcttggttctgcaactgcatgcaactcaggagtgcatagccaggtgagtagtatttacaacatgctgtgttcaatcaggggagttcagcgccaaagaacggcctatatccaaaagtttactgaacgaacaagaaacaaaaaagaaaatcttatctataaaggtcaaagaggaatgcttttccgaaaatgtgaaatatatagatgtaagaattgaaagagtgcgttcaggatatatacatcaccaagttccatgtgcagagggcaaaaatcagggaaattttgaagagggaggcctggcatggtggacgagagcccactggctagccaagaagacctgccgatgcagccacattgcatcatccacgccgcaaaaactcaccttgtgcaaccgtcgccatggctgccggacggaactgccaacagagggcgtgcataggcaagtcattcttggctaccaaaaggggctctccatctccatgtgaggccgccctcctctttttcttcttaaccttcagccatgcctgcaagttctgtggcgtttggtgtctgtgtgtgtgtgtgtggcaacactggttgcatacgcctggtatttatggtgtggacaaggagaggggtcaggtatttttggggagcagcttttgccattatttgttcttcagtttcaaggattgaacttagcagct

SEQ ID NO: 9863 - DNA, 623 bp, Zea mays
ttgagatcaggaatcttgttattcccttgatctcctttccgacgtggccttggaagctgcgatggtcttgttggtgcaggtaacgatgaaaagtaccttaaaacaaaacataaacatttgtcatccatacaaggaagagaacgtaacagagtttccaatcagtcacattgttgcacctgtgttctagagcctgctgagcactgattcttgcttttggatcataggtaagcatttttgacagaagatccaaagcatcatcgctggccattggaaacaacgtacgtagtggaggtgcagcaacatattggtattcaacataatcaggaagataaaccatgtcaggccattgagaagattttggggtcccaagtgctgcgaaaatcttcccaagttgatcaatgtcactagaaccctgcaaaataacactttttgtgaatcaggcgtccttaatgaagccgcgtagctacaataatggatttgccacccactgactacaatagtgtttcctaatcccaatatctaagtacacggtacaccattcaacaagaaaacccaaatgatggttctttgtagtgcaactctacagtttagcaaaaaattaactgctgcgcatcagtaatgct

SEQ ID NO: 9864 - DNA, 831 bp, Zea mays
acaggttgctgatgtcaatattgtggaattctctagttccttcttcaatctgcttgggaggccgggaccatcgctgaattgctggttaagtaccaagccgcggtgcttcaaggtctactctagaaggaagaagataatggtggttgaggaatcggtgatatcaccccaattgctggatttcagaaacgatctcgtgttgccgacgactcagctgttgcctactcctcctctgattgcttagcgcagaaagacaataccaagcaatttcaagccacggcgtagcaggagggttgcgaagtttccccctgagttgggctctgaatccgctgctaaagtgtgcagatttttgggtttctgtgatgagcaggaaaatatttctttccaagatgctaggaagtatgctagcttgtttgatgctgccctgtccaacgatcatattgctgccctggcagctctgtttggttgggaggtgccccaggtggtgcaggcctgagctggttctgcccccgtcttggttgcttgttttactcttttccatggaacctggttgttttttggtttggaatgtcaggggccttaacagtcgtgctaagagagactctgtcaagtcagtggttgtaagccttaaacctccctgtgtttgtctttaggaaaccaaattggattctgccttaaatttcaacattttttttattcttgggtccgggttcagaaattttgtttttaatcctgcccatgggtccagaggaggttttctaatcgtttggggtgatggttcggttggctcagctgcctcaagtattaaaaacaattttgttttaattcagttgc

SEQ ID NO: 9865 - DNA, 775 bp, Zea mays
ggcccgtgtatcctttaagtcgacctgcagtcacaagcttaaattttttgcgcattttcaccgaaggaggcttgcttgttatattaactttcctaacatctacaattggaaccttctaaatttatctagttttattcctgtctggaacataatgaagatctttttgcttggaggaagctgcctccattttagttcccacatacaaatgaactatgttattaatttcatgttcacagcttcctacatgtgctccctaggtctgaaatttttaaggtattaaattgttgacaacattttgctttgtaccactcttcattctctctcaaagtccacaaccataaggactgggtggtattcgatgttctgtttttcgttgaagactgtaaaggatatacgacagctgtagactcttgtagagagatcttttagtttagcagatattgtctatgtgaggtggcaaatggtaatagttgtctaaaatagtggaaaagagaagtccaatcagttaatgagtttgagcaaaaaaattgtataagatatgatagaatccaaggtcaagttgaggtccatgtactattagtaggatttagccttatagattatcttaagatgtgtaaaaagatcgactcaagtaatgggaaaatacatttccatatgtcccgggtgccattacccttattgtccttttctactgtcacttccacatttctttatttgcaagccaaggtaattctggacctcttgaattttaattaccaagtacaaaaaccatggg

SEQ ID NO: 9866 - DNA, 525 bp, Zea mays
tgttcagactactgactaatgttgtaatctatagagataaaataatataaaagcagcagtcgtagtcgggttaaaacccactacataagagaaatcatggtaaggtacacatccctttccatttttgaatgggccttcgcaaagaaggaaccaaagattaaaattatttttttaattggaacttccttcatttttttatttttggcggggtttaagtcaaaaattaatttagaaaccgttaattttgtttaattaaggggaaagagcctttaccttatccgggattggttggaaaaccaaatttcacacgtttccccggttcattaccaaatagctaaaggcctttcgaattgtgcgttttttttaaagatagcctaggcatgtagcaactaattttctggttggagatagcctaggcatagcaaaacgaacgcctggcagctgcctgccagccaaccaacgggcaacgcatcgtggccacatagatagatttaaaattatcaatgatagtaatttctttgttct

SEQ ID NO: 9867 - DNA, 810 bp, Zea mays
tcgttccccggtgttcctttaaagtcaacctgcagatgaatgccaccatgaagaactggttgcgtgtcatgctgctaccttttctccttcgctccttctcatgaagtgccctggtgagcataatgcatcagaaatatgttgtttcaatttctcaggaatatgttatttttgtcttgaaaatttaccaaatattctgaggctgtacatcagttgtcttataaatatacataaaagatatggttgctgttttgatgggcatgttagctggttcaggaactcactactttatccatgtgtacttatagcagtccacaattgtgtatgtccttttgcccttgttttgatcttaataaagaaccatggaagtggcaagaggttcagcattttcctacttttcttttgcttgggtatatgtggaattgtggatcaactagcagtacttactgatcttttttgcagcttgtaatttttaacccgcccggtgttgcttgcttgcaaagactgcacctgacgatgaagtggtttgtgacgttgaagctttgaatcggtaagcactttctgttcactttgttatattttagtgctggagttgtttacaacgcatacatcagctcgtactgcctctactctttttttcagtattaatattagtgtcagggtgtgtgtactgaccaaacagttaatgacaatacccttattgctttgtccattgtgttgaaatgattcagcccaatgatatgataccagaaaacatatccatgcaggatactggacattaaattatagcgtttgatgctttgagaatctttt

SEQ ID NO: 9868 - DNA, 753 bp, Zea mays
cgtcctgcttcttcaccatcgccatccgttcctcctccgtatcacaacgtattttttagactgacggatggccatctttccggtagtcggtgagcgtgctgatgttgaggtatatgacgggagttttcatctgcctcaagacctgctccaagacaaccatcttctcagggtactcagtaaggtacgtctggttgaatattggctcggtctccccgtggcatctccctcctgagttccactgccctcctctgttgccaaaaaaatttcattgtcaagtgaagatatatggcaccaacaatcacctaggaaggaatccagccagcgaagcgtagcggcggcggcggcggcgatgtcttacctgaaatgcgagagtgagtatcctctgaacacgacctgagtcctcctcggatcgatgttcttgtccacccatctagcccaggtgacgagggctctcctgtacgcgtccagaacatcgaggctgggatacacatggttgccctcttggtagtagttcagcctgtggactagcaagcaagcacttcagaatgtttggattatggaaaccaagtgacgagatgaattgatgatactcgctccagaaagtacaatgtaccctcttgatgttttgtagtgagtccacccatgggccggtgttgaaaaacgaccaatgtcccgcggtctggtatgctggggtcgtcgcgtctagctcatccagtttcagcttcgcgtcttcagtgccgtttctgccctcac

SEQ ID NO: 9869 - DNA, 759 bp, Zea mays
ctgcatctttattgagaattacggtacccatattattatttctgttacggttggtggtaaggacgaagtatacattaagcagcattcatcgtcccaattgtcagggttagagttcaaaaattatgtgagggtgtattggtagggaaagattctcagatgtggaaaacaagtcaaatgcaactcctatcaattacagcgagaaggttagcaaactccttactgctttctttatctaagttcactagaggtgttttggctacattatttggtttgcctgaattgttatacaactgtttgtttacaaaggatagtttgtgcatgattgattactttttatgagcacttgatgcatctctaaaaaatgtgttagctgctgtaaataaacagtcacaatcagttttttattggaaaactgtgggggagttcgccacaacacatcatttttttaataaaaacagagtacaacatatgtacaaaagaaaagaaaacttcgattacacaagagactagccattggaaaacagaagggtcacgatcctctctgactcgatgcatttggaggatggactaatccttgaatctcatggtccagaggttatgaactagcatgatctccataaaaatccattcctgagcttccagagctcccagcaggctgccatggaaatctcacaaatgtgaggttgtctcactgctaaaaagcctccatgcaagttcaagtgtaaatctaactgtgtgttgagagtatccgaggttttg

SEQ ID NO: 9870 - DNA, 751 bp, Zea mays
catggccctgcagtccatcagctttcagcaagcacacacacagtgactgatcgactgactattcgacgctctgctagctggcttcctgtgatatatctcactgcacctagctaggttccggcgtcaatcagctcgcaacacgtagacgtgtgccaacctgcctgatctcgacaagttcgacgatgggtccatgatcttgtccccttcctttttgttgccaccacgtccctgtatccttaaacctcactttcaactgtaaagctggttccatgatactgctgggtctcgctgctttaatgggccacatacgcgccaactttctcaaacatacgctgatcgatatcgacgcacacatgtactccccccactctttgcatgcatatggctagctgaacgacttgcatctggatccgccaacgcgcggctgccaaaacgcgcgtgcatgccattattgccagccactctaggtaattaccaagaacaagacctctgaaaaaaagatggaactaaccgatcgagatcttatctcaacgaccatcattacgtttttattaaagatggcgcgatcgatccgatatcgtagtaacttactagctaatcagtgtctcacccaaaggcaaaggcaaaagtgatgatgttgggattgatagattagcaggtcaatcatggaatgatgttgctagtcaattacaagccaatttggaaggggcatgagattaacatgatgaattcatggctagctcgctcctaa

SEQ ID NO: 9871 - DNA, 748 bp, Zea mays
gcagctcacacagttctcgccgccgtttctggacgcaaggcttccgaacagcgacgtcgcgacgggggtgaacttcgcttcggctgggtcaggattcaacgaccagacgtcgcggctgtccaacactctgccgatgtcgaaacaggtggacctcttcgaggactacctgctccggctcagaggcatcgttggggacaaggaggcttccaggatcgttgccagatctctgatctttatcagctcggggaccaacgatttctcacactactaccgttcgccaaagaagaggaagatggagattggtgactaccaggatattgttctccagatggtacaggtttatgtcaaggtaaaaataggcatttcctccttctgagttatcttatctctactgaattcttatactacacttcagaaactaggcataactttaccttcgattccctactgtaactctgaatgcaggaactgtatgaccttggggggcgacagttctgtttggcaggccttccgccgtttggctgcacacctatccaaatcacgttgagcggagaccctgacagggcatgtgtggatgagcaaaactgggatgctcatgtctacaactctaaacttcaaagacttcttgcaaagttgcaaggctcactccatggaagcagaattgtgtacgtggatgcatacagagctctcatggaaatcctggagaacccggccaaatatggtaatgctttctgttaattccatggct

SEQ ID NO: 9872 - DNA, 778 bp, Zea mays
ggagaagattctaaacacctctccccctctctctagtctttactctttcctagctttttcattctcttttctcctccacccggaaaggatccaattggccaaatttttttctaacttctaaaaccgcccatttcccggctataaatggccccctcctccaggcttcaattcccttttcccctcttcccgagctcccttgctaggttcctcgtccgtctctctgtcctagtctcgtcagcaacagcacagtgttgttactgacgcgccttcactctgttgacctgcatctagccaagtttttttggagactccaacctttggtctcccaaacttggagctcccaaggggagaggttctgccaaaattttggcttctgagcatccattttcagggggaggttctgccaaaatctgctcctgtgaacatagatttctcaaggggaggttctgccaaaatttcctcctgtaaccaccagctttccagggggagattctgccaaaatttcctgccctgatcatcattcttctaaagggaggttctgacgaagttttcttgggtgacgacgacgatcagtttccagggggagattctgccaaaattttctgcactgaccaatagtcttccaggggaggtttctgccaaaattttcttcttttactatcactttctccaagggccaagcccctgcccaaaattttccttcatattttaacatgccattcgttagcacataccagaccaattaaacctctaattttgctcaagggtaaccaaaaaa

SEQ ID NO: 9873 - DNA, 707 bp, Zea mays
cgggcccctttagagtgagctgcacctcgcgcggcttctgagctgttcttccacctccaggaatggaggcattgttaggtcaaggtcgttcagggtactcgcaacaagagccttcggaggtcctcggcccaggccaagcttgagggaaactgtacccgtacccgaaatgggattcgacgaggtgctatagagttcaggtcgcattcagatttcagaaccgaacctgttcagaatttcagagttactcacgcatggctttcctgtttgacaggttgtctgaggtttgctgctcaagaaggcacaccctgaagcccagcgttccctgatactgcaacaggggatgaccaagcagtccagatggccccgaaaggaaaggtagaggccgaggacgaagaggtcaaatggatcagaactgattctccagtgtatttgtagcagtgtgtaaacataagataggaccatgcatctggcatatccttttcattctccagacatcgtgctagagatcctgattccttgtacacttctgtttggtacacgcctctttgcataagatcttattagatggccttcgaagccagggaaaacaatatgggtttctatgttttccttctgacgtaaccagatagaggtattccaattacggaccatattattaaaccaaggggtgggcctacaggtagtatacactccttgaaaacaacttt

SEQ ID NO: 9874 - DNA, 863 bp, Zea mays
acctgctgatacctctagagtggacctgcagaaccaatcctagcctcactcagttttgcctgacgacggtgatttctgtagtactgtactattagctgatcttataaattcagttcaggtgtacatggtgcaaaaatagatcaatagtttgtggtgtgtttggtgtaaaaatttagttgacattgcacacattgcttctataagttgcacatctaaatgctaccatggacaaccatctgtgaatctgtgatagactaatggcctatttgggaacacagtatttccttagtcccaagacaatactgtgtatttgagcataccatgatattttagaccaaaagacgtatgagagcataactaaaaactctgtattttaagtcatggttttaccaataccacgatatttttgggataaaaaaactttagtctggaccaaagttttttgcttgcacgcagtctcctcttctcctacactataactggaatattgtgtctccaaacaggtgttagattggactgatatagaatatatcatagttatgtcatgacatacaataaactatggttttataagctgtggttttgagaagcagagttcccaatcaggccctaagctcttgccaaggactcacacatgcccttgaaatttggatagcaacttgcatgtagagccccaaacccaacataaatgtatatctgaatgcttttaatgtgaaattatattcttatgtgaacacctagaaaccttcgttttcgcggtttatatttttggagttgtggcgccttagaaaacccttaagggcccggattttcaggtatttcacctattattaagggggccgacccatttttttttaaaccga

SEQ ID NO: 9875 - DNA, 706 bp, Zea mays
gaacagctatgggcttgcggatttacggtgtggggaatttgaaattttgggattgaaggaaggattggttgactggattacctgtacgcggaacctctcaattagcgctccgctttggctataagtttcccggtttccccatttttttagtacatggatttggagagctgagataaggaatctcaagctaattctcaagctgtggtagtagtagtacttgcgaagtaggatgaggaggacgtggcctcatggctggagcctttttgtggttatgcttattcactgcaatagttgtctgacttggattatggtagttgacctcatggctcagtcagttttggagaattgtatcagatcaacggaacccttacttctatttgtttcaagcaatagtgggaaatgatcatatactgcaagcctctttgctattgtatgatttgtgctgatttaatgtcgtctaattcaagttttgttttattggcatgtcatttattggattaaataagcctatgcactgatgcttctacctcactatggctgtttacaatgactgtgttgcttcactagaagtagagttgtctatgtctaggattccgtacatagttaacatcttgcatcatctgttttggccaggtattcctgttctcagattctaatatgtcactgttttaatattacagacgcactatgtattgctcctttgctc

SEQ ID NO: 9876 - DNA, 436 bp, Zea mays
ataaagttgttttctttgttcgatgaactaaataatgagtaaatttcagtgaactatgtgactggtcctaaagataattttagcttaacccatatccaaaaccacacgtgtgtccatattaccacgaactacgctttgtaactagaataacaacattgatttggatgtggactgacatactgggtccattgtaaaacagttgcagctcacagactaacagtgtcatatactcatatatgtctaggcccaatatgtcattgacatttgaactaacagtgttagctaacacgttcattttttctatcatatgaaatgaacaaatattatgtagcattgagcctttgagaaatttgttcatatttttttgataatctagactatatatatatcgtttagttattaccagtaattactgaagatcgttcagtaattacca

SEQ ID NO: 9877 - DNA, 446 bp, Zea mays
agccgggacgagaccacggccaagcgagtcgagacgacttgaacaagtgctgacgagttgggagaccacaatgcgagcaggcacgatgtgagcaggcactcagcacggtgaccagggccgagcagagaggaactgggacgagcagggagggcgtcgagctaggtccgagcccgagtgcagcacgcgcagtgagaaaggagctcgaaaccgagctgagggaggaacagaggatatgggcgccgtcgagcaggaagaactgccatgggaaggaggttggacacggtctggcaaagtgacggcaagcaccatggcgcgcacgactcagggagattgggcacgcgtagggagagcaggcggccaccaggggcagcgcccaagcgtgcgatggtggagcaggtcccgggcgcaggaacgctcggaccaggggcgcgcgagctgagggagca

SEQ ID NO: 9878 - DNA, 658 bp, Zea mays
  unsure (1)..(658): unsure at all n locations
cccctgggnacttcaaccgcagtcttgccattctttttaatcactggttcaatatttagatatccccggatgttcaacttcaaggctagggtggagatgctccattagtgaaagaccgatcttcccataccaatcatcttcctcgcccactcaatgaatccatcctcgattgaactagggcttcgcttcgctattgcctctcctgccttgtgtagtgccctctggggactgctctagttccccagatcttagccaaatcagtcaagttcaatgctaaggattgagggtgaccagtggtcttatgtgcattcggaagaaccaacctatactaacatataagaccgaagggacagactcctttccgaatggtctatggggcagaagctataatcctcactttttcctagcgtctagacaccacctattagtagtaaatcaagaaagcatttaaccatcgtctgcgtgcatcaattattgctgctttccgaagatagactgaatgctgaatgaagagaagacttatctcccgccgttgctcgagcccgagctgccgctgtagtgcaatgggtctttcaaggatcgaattgggcatgatctggccttcatcctcgaggatatcctggaccttcacatgaacacattcaacgggtcgatacca

SEQ ID NO: 9879 - DNA, 988 bp, Zea mays
tgagaatataccttccccacatttcagcacctgatcgacagagcgatcatgacagagaagaagcgcaatgagatggaggatcgcaagcgcaagattggtggacctcaacttggaatcagcaattgccctcgtttctcaggcaacccacctcagcagttcaggcagaaccaacacccacctcagcagcagcagtttcaaaggcagtaccctcagcaccagcaacagaaacgccagaacaatcagtcaggaggaggtcagttccagaggcagaatcagcaggcacctcgtcttctcgccctagcaaccaaccagagcagtcaagcagcaccagttaagggtggaagcagagcatgtttccactgtggagagcaaggccattgggtgatgcaatgtacgaagaaggcagtccagcagcagtcacgccccagggccccagcaaagcagaatgtgtctcagcctagagcaggcaaccgctctcagccacgctacaaccatgggagactgctcccagttgagctggaggaagcggatggcgcggaggaggcccgacgcgaacacggcgcccacgcgcagcacgtcctgccgctggcacagcccgcacaccatctgcgcgtacatgctctggaacgcgtccgcgcagaggatggccgccgtggggctcgtgtagttgttgtacgcgtcgaacgggcggttcctgaagtggttgctcttgtagtagctcgtgaggacgggcctcgccgcgaggccgcccggtgtcttggtctccgacttgacgaacaggaaatggagagctttccccttgtccatccctggcacgtacctgcacgtacacgatcattcaaccaacgctcatggccaccatcaacgactgcgctgcgttgcgctgcgcacgtgtgtgctagctgccaataataattgttactggtactggaggagtagcagcagaaaacttacaggttcatgacgggcatctggaggctgtacagca

SEQ ID NO: 9880 - DNA, 432 bp, Zea mays
tgcagaaacttgacgtactgaactgcttcctccagcatagtgctcatgtcaacctgcaaatgcagaccaacctgtctttagtcggtgttcacataaaaagtttgcgcaaattgctcggcccaaaaaagaaaacacaattcggtagcgaagaagttgaggatgaccacatacgaaacaaaagagcatactttggtgccattaggaattagctgctgtagcgtccttagtttttcattgatcctctcccttctcctctgttatgtagtataactaaaccatcagaaaaacaaaaaaactgcaggttcagtgatcactgtgaaatttacgctgagtgcttctgacctttgcgtagaggctctgtgaatcctttgaggagcggctaggacctcttgagctggtactttgtttcagaacaataggttcctcgcatgc

SEQ ID NO: 9881 - DNA, 536 bp, Zea mays
ctacttcgagctcggtacccctgatttcggcagaacctcgcggcgcgaatcacgggcgaagggaatttggcactagtttgactgacgagagcatggggcatggggccgatcgtataacgagtgggaaatcatgcgtggcaaagcacccactggaatcattggagcacagctcagccgagccgagcgacaagaatactccgacagattcgggtacggcgtgatcattgggtaaggggctggggaacatgcggagttggccagttgggttcgtgggtcgtctcaccacgcggtggtactggtgctccaagtgcggacgaactgtgagcccagccggcggcactcctgctggttggcgccggcagccgtgagcaggacacgcgttgcgataatcacggtccgaggcgggaagaagaagaagaagaagaaaaggcccgcgccgcgcccgccgtggtccgtccacacatgacactccacacaaatcgcctgccattcgctcccgtgcgcacgcgcgttgatcaaaccgctaggcgatgggc

SEQ ID NO: 9882 - DNA, 481 bp, Zea mays
tgcaagtcgtgttggttttgaattgacaaggagaagaagcgtctgatctgaaaacgggggcactgccactgacagagaaccggagacctgtaaagaagaaacgactgtacacagctcttaacacggccaaagccaaactggaaaatgccctacatcaccccaccgaccgagtaggtggaggaagaacaccaaggttttcactctcctctttcttaccccgaaacagaacaataccccagagaagaggaaaaggaccaagcggaaaacaaggcacaagacgatgtacacaacccactgatcaactcaaaacacttagtactactctagcatgcatcctagcactggtacagcgagaagcccctgttcttccacagagagctcagcgtcctgcccagcttcctggacttgacattgaacaacggcttggactcccggtggtggcacgcgataatagcaccgccaccattcccgccctccgcca

SEQ ID NO: 9883 - DNA, 577 bp, Zea mays
ttgcgcaatagaaacagcgaagttcttcgatctcagtattaggccgccagcatatctgtgacttttactcagcaaaggtggcctcagcgaagatcgcaaactggacagccaatgttcctgttaagcaaactgttaccttaccacattagcaggcaaaatggtagtattgaaggcatcgctgctcgtctgaagaaattacctctcggatattttggtccgttgaaaaatctttacacctcgctccttttggtacaacagcaaccgaaaacgagtcactgatgttcgacaggtacatcaactttgacaacgcaaaaggggtctcgatatgatcgttttcctgagacacgtaactatgttcggtgctgagctcggcaaacagggaatccttcttcctgacaggagcctcaaacacaaaccgtgaactgatacacgattctgcttctgagatgtctcttgggagcgagccagcgacattgacaacgcccttgacccgagtgctttcttctgcgaatggaccaactttggtagctttgaacaacgagatcactctttcaactttctcttgtctctccctcag

SEQ ID NO: 9884 - DNA, 438 bp, Zea mays
tgcagatattgctcgataccagccagagagagatttccatggatatcttgtacctaattatacgaggtaagggcctgttgaacagtccttagagcaactgcaagagggcaagaggctactaaaataatattccccaaaacttgctattggagattgttgcaaaaaaaaaaaactaaaaaaaatataaaccacacaacagaatgctaataactgatctctaaaaatctaaaccccagtcttctacaccttcattgatgtcgctgcgcgacgggagcgaccgcaaggtggactgggtgcttctggacaacttccacgcttccatggcttgtaccagattgctctcccgccaccgctgcaccagatttctctccacgcatccatgcaagatgaccgtcaaacagttgctctccacgcgtcaagcaagatgaccgtcaagca

SEQ ID NO: 9885 - DNA, 486 bp, Zea mays
tgtcgcctcttgtcccttgacatgtttctgccgcctacactggacgacgcttgatgcatacgagatgatgagttggccgcaagttttcttggatcccagcatacgatacgatccaccagctcacccgcacacacaaattattgacttttttttttagctcgctttgatttggttgcatccgttgtttccgttaagcaggggaggaaggaagaggctgaaagggcggcggagagagaaaggctataagagcgagctgggtccctcgaggatgccatcaagaaaccgcgtggaggggagggcgatgagatgagggatgctggccgcggtgatggactactttagctcctgctggggcccgcgatcgggtgccgggcaccggggaaagggctccgacgccgctggccggcaggacggtctcctctggtacaaggacgccgggcagctcgtcactggggagttctccatggccgtggtgcaggccaacca

SEQ ID NO: 9886 - DNA, 751 bp, Zea mays
tagaagttcgaaacaagtcattacaaaacacatagtttaagtaaccagaagcctgagattgctcaccatcttaattagccgttgtcttcgcttcctgattgatgattctatgctgtcaaggtatactaaccttcatgtgcgattataaactgcacccatcagaactgattctccaagagcctgaagaaacaactggatcatcaattaaccagacatcaactccaagaggccaatgttcggtcttctcagccctaccaatgttcttcatgtgcacgctcaggattcctaaaaccatcattaaggaaattgatattttcagaaagcactgcctgtggagaggaaatgacatcaactccaagaggccacctttgattgcttggaattcggtcactcaaaggaaagtgaatggtggcctgggtgttcttcgattagaaacgcagaacgaggctcttctaattaattttttgcataaatttttcaaccgcagcgtaccttgggtacatctgatctggaacaattactaccttactcgaggtctccctggtaatagaagcgttggatctttctggtggaagagcattgtaaagcttctgccaaacttcaaaggactggctacccccgtcattggcaatggcagatcaatttcattctgggatgatcagtggagtcagggcatcccgaggcatattttcccagagctcttctcctttgccaagaactcaaaaatgactatcaaagaggtcaaggatca

SEQ ID NO: 9887 - DNA, 523 bp, Zea mays
tgaacggaaacgggacgtgcgcaggcgatgttcgcgaaggtaaacgaccgaccgggctaggctagtaggatgcgacaacgcgatcggtgaccagcagagctagcggcagcttggaattccgatcgagaggcggccggcaacgcgcacgttcgtggaacagcgacggcagtactggcagtggcaggcggtgaggtcgacgctcgatcggttcgcgtggggcgtggggagggacgatggaacggtagacgggtcggtgggtcgaccagatctgagctcgtcggcctgtacttgccgctgtagctgcccagcttggtttgttggatgtcgccgctgtggcagcatgatccgcaacagccccggcgtcaggctggctgcttcgtctcatgcgatgtgcagtcgtgtttgagttgacaggacgagagctgcatgtcattgtagtacgttacgtatgtatcctcggagagccccccgaaatgctactgtaggcgactggtggcctggtgggcggcatagcactatagca

SEQ ID NO: 9888 - DNA, 474 bp, Zea mays
tgcctatgaaaggaggtattagcatctccatcttttaaatacctaatgcgtgagcgaagcctaacaatggttctctcaagagatgccagtactaagcagctctttttggcttctcttctcagcccttcacccacagaaatctgtctactgtcttgggctatttccaatttgtggagaatctttcttgcaatcccaagctgtgatttgacatggccaacttgtttctgccccttagattgaagaacacgggctaatctctttagcttgatcgaaattcgctccatgggacaaactgccactaccgattcattccatgaattcgccactgtttcgaggaagttaggcaaatccatccaaagttcaatcactgtttttctagaacattttttcagcaataaagattctctgtgtatgtctaaataaaactatagttgattggttacttatgagtcaggaaatatttggcacatttca

SEQ ID NO: 9889 - DNA, 544 bp, Zea mays
gtacgagcccggtacccctgcgtgctgcagaacgtggtcagcatggcgtccatcatattcgttggccacctcggcgagctccacctcgccggcgcttccctggccacctccctcgccaacgtcacgggctacagccttctcgtacgccctcggaccgaccgagtccccaatccatctactagcactccgttccgttgttttgacccatcgatcgttttgttgccatgtctcgatcgtcgtggccaagaccggaatggcgagcgcgctggacacgctgtgcgggcaggcgttcggcgcgcggcagcaccacctcctgggcgtgtacaagcagcgcgcgatggtggtgctcgggcttgcctgcgtccctatcgcggtcgtgtgggcgtgcgccggccggatccttctcctcctcggccaggacccgcagatcgcggcggaggccggcgcgtacgcgcggtggctcgtcccgtcgctggccgcctacgtgccgctgcagtgccacgtccgcttcctgcagacgcagagcgtggtcctgcccgtggcg

SEQ ID NO: 9890 - DNA, 590 bp, Zea mays
taattcgagctcggtacccctgcttgggtctctgcttagaccgttccacgaatgcaagtaggagttccctaaaaatattttgcaaattaaggaactctctcaatcgggtatggggtgccatttgaatttcagagatggtgatgatgatcgtacttgacaatgttttccagcccatcgatgagctcttgacggtgaccttgtgcacggataatgccattatagttagccacctagggccagtcttgggaggcaacaacctacaaggaaccaccaggcataaagtgttattgtaataagatggtaatatccgtattgtaaacggaaaaagagcttaaagaagcaatggacggggaagtatcatctagagcagcagggtgagtgacatcagcaccaaatataattgttggttcagtcgaaaaaaacaataagctttcttcaggattagcaaattctaagttccttcctccaaactacagagagagtgaatatattagtaccaatgttgctcaacaaattctgtgaagagatatctgcagccatcagtcagcaaacatatataggtaaaaaacactcttacctttgtctcacca

SEQ ID NO: 9891 - DNA, 1049 bp, Zea mays
tttattaattgaacttgtgacattgttttaatttacttagtggtagttttttagttgaactacgtaatttacttatcctttcctgtagatataggggggtgatttacttaactaatcaagtaaacgtaatcaagttacctcatggaggaggatcgtcgatggatgtatgaaggttggaagaaaagaggagttctatcaagtgagtgggttgccaagactgacgcgtttctcgaccgtgcttttgctcggtcagagactggaacagatgttaggtgcccttgttgcaactgtcgaaacatttatttccttgacaggaggactatgtcgatacatatttgcaagaacggttatatgccaggctatgaggtgtgggtgcaccacggtgaggacccacctcctcgtattgtatcggaagttcagtcacatgaagaggaggactacgataggatggaagagatgcttgatgatgtacgccatgagcttctaaccgtcgattcggagaaccccggtcaacccaccgagtttgaggatccagctacacctgaggttcagaagttcttcgagctccttaaagctgccgaagagccgttgcatgagcacacaaaagtgaccgtccttgtatttgtgactcgacttatggctattaagtctaagtttgcattctcaaacaactgttacaaggagcttttgaacttgatcagtgatgtacttccagagaatcacaagatgccaaaggacatgtatcagtctaaaaagttgttatctgggctcggtatggactacgaaaaaatcgatgtctgtgaaaataattgtatgcttttctggaaggagaccgcgggtgagaagaagtgtactgtatgtggtgagcgtagattcgttgaggttgaaaacgacgatggtttgaccgtgactacgaagattgcacgtaagcagcttcgttacatgcctcttatacctcggttgaaacgttttttcatctccaaaaatacagccagatacatgaggtggcacaaagaaggggtacgtgagaatccaaatgtcatggtgca

SEQ ID NO: 9892 - DNA, 485 bp, Zea mays
tgctccgcgtccttccgtatctggctgaaccagtacgccaggtgccgggtctcctcgccctcgcccacgcggctgtcgtcgatggccgtcgtccctgttatcagctccagcagcactacaccgaagctgaacacgtctgctttcgttgagatcttcccggtaactgcagcagcaacatgatagatgatatcatggtcaaacctaccccccccccaaaaaaaaaaaactagaaatcaatttttttacctgcatactcaggagccaagtacccaaacgttccagcaagtctggtcgccacagagtagttcccatccggcgcatctttcatgagcccaaagtccgccaccttggcccggaagtcgtcgccgaggagaatgtttgccgacttgagatccctatgtatgaagcggtggtgccccaggttgtgcaggtactccatcccacgggcaacatccagggcgatgttgagacgcttcttccacgac

SEQ ID NO: 9893 - DNA, 501 bp, Zea mays
tgcaagagtgacctcccaagtctcatttggcaaaccataaaggcacaagttctctttctctggcataagaaagaaagcactatgtcaacgggacaaaacaaaaaaatatggaatctgatgtgttcatgtcaacaatatggcatattactgaacatcagtagagagcagaccaaggatgctattagaaaatgctaatccagtaaacgggtgctgcaatgatgactagaagcaactttactcataaccgttttccatgaatgtacgtcaggtttagttgtggacattgagcaatattaggccggtcatcgttgatgtctgcatctgacttttatcgtgtctccacttcacacttcttcagacaatttgtaattccttctactaacatatgttacttctcattcctttttcatacacaggagggcaacctggaaaaaccaggttacatgatatatcaagtcaaaggcactatatcaatttagttagcttttatagttttaacca

SEQ ID NO: 9894 - DNA, 602 bp, Zea mays
tggactggccctggccggatggatcggtgaggggggccgccgcccgccgggcgacgtgatctgatctgtggtgacaatttctgaggaattcggcagcggagggcgcgcgcagggatcgacctgctgcacctgctggctgcgtgaatgatgcgcccacacgcgcgttctgctgcgtcgggcgcttggcttgttcaacgcctccaatgatttttcttcttctttcagtcccggccgcatccgttgtttactgctgcgtcactcaaacgaggggggggggggggggggggcaaagatgcttagatcaagcgtggaagcaggtcgtccatcacggcataggcatctgaatagcccaagccgagtagaacatatgccaaccaaatcgccaccgaaaaccaggcaggcacgcgcaaggtcatcgaggattcgagatcgagcagcctagctacatggacaaatgccccctcttaccgcggggcccacacgagacgctgcgtcggaatcggaagggaagcaaaagcaagcagcaagcacacaggacgacaggaggacagaacgcgagatgactgggggaacgggggtttcgttcagggttttgcaatcgt

SEQ ID NO: 9895 - DNA, 543 bp, Zea mays
tgcagcacaaactccaggttccacagcacatcccccatagtaggacgctcgacaccatactctgcaaggcatttctccaccgtctctccaaacttcctcagtgcttcaggcctgactgtcccagcaatgcgctggtcgacaatctgatcaagctctcctctcttttgccacttgatagcccactccgcgaggttgatcatgtcccttggaagagtcgggtcgataaccggcctcgcacaaatcacctcaagcagcaccacaccaaaagagtacacatctgatttgtcagtcagcttctgtctccggaagtactcaggatcaaggtacccgaagctccctttcactgctgtgctcacatgcgtctggtcgaattcaggcccaacctttgagaggccaaaatcagaaaccttggccaagagattttcatcgagtaggatgtttgctgacttgacgtcacggtgtatgattgactgggcaaaaccggtgtgaaggtagtggagccctcttgctgctcctacgcagatttccagtcttttcttccag

SEQ ID NO: 9896 - DNA, 485 bp, Zea mays
tgattattatgccaattgctaaccattttctgagagggaagcaattttgttttaccattgtaaaatctgtcttttttgggccaattatataaattacaaaattgcatttttggattttatggacattatgatttgatcaactcccagttaattgagacacttgctatctgctgacaaaatattgttgatgtccactggcccccccccccccaattgcagcctttgtttcctggtgaaagtggtgttgatcaactggtggaaatcataaaggtttgcatctgctatcaaatgccatgaaaccactggtgatactttgtagactaatgtttttctttcccttttgatccaagattttgggtactccaacaagagaggaaatcaggtgcatgaatccaaattattctgaattcaagttccctcagataaaagcccatccatggcacaaggttagggatctctaatctctgtggtgttttttcatttca

SEQ ID NO: 9897 - DNA, 443 bp, Zea mays
ttagttttcaagagctataagtgagattacttctgcattgaatggacttaaatgtgggtaggcttttaatctagcttcaacttttgttttaggctttatggaactcattgaacactgtcttctaaagtttcactgatacaaatgattcttgccatttcttgtatatgttgctttcttttctctgacattattctattgattttttggtacatgtttgcttctgtggaatgtaacacttaaatgtcactgaactgcaggtagtatgggggaggatttcaatggttgatgcagagaagaggctgttaggaaatgcattggaagatgttgataatcaatttttcgtcttgctttctgacaggttctaaatgattttgcaggcaaaagagagctcttttctcaattcttctgctagtaatttaataatccttttttcttgtatgaca

SEQ ID NO: 9898 - DNA, 453 bp, Zea mays
tgagctttccctacgtcctgaggcgcctgaggccgcccggcgttcacctgttcccggtttgcgcgcgcaaggacctggtgaacagcttcgggcacaagcgcaaggtgaagccgctcgtcaaggacacgacgtgagccccttgtggaattgggccctcttgggtttcgtctgggctaaagaagaccaacctgcctgattagtaatttagtggtagtagccttctagttccttccatccagtagtagttcataagtaagaaccaaaccgtcgtgtaggggagggtcttgagtcttgacgtagtgaaattagtcaaattacagtcggagacgcagagtagtagtcaccgaaggagtgcaacgtaggggtaggatttatcccggtaacgaaggatgtacttactagctgacggcaatggcgctgtcgacgttgctgcaggcgaagatggcctgtgca

SEQ ID NO: 9899 - DNA, 550 bp, Zea mays
tggttcctgattgattaactggtatgttcacaggaagaaaagaaaagaaaagaaaaaaaaagaatcatgcatgacctctggtcaaattttttcgacagcaatcagaatcgctttgccaatatgcccacaacaggttacaacagctcactcaggtcacattacatagtatcagcgaatgctgcccccacgcaatgacaatatgcccggccgtttggttctcacacaggaccgactcggtcaccccatacaaaacttgcagcaaatttacagacacggacacagcgcacggtctctggcagtggcagccaggttcttacaagggcaacgccaaaaaaaaaacaatccagcaccaggcacactgtctgctgccggggcatgaggccatctttccgggtgatgtgagggtatatgaattcagatgaaaaacggcatggcaatggatgcttcacgggtcaggtttgtacagcggcggcgcttggctgctgtcccgctttcttctcacggaagccctcgggtcttccctaaatttgggggcgccctggacttagca

SEQ ID NO: 9900 - DNA, 502 bp, Zea mays
tgcaggtgctccgccaccatgcctgcgctgtccgcagccggacccggacccggacgggtgttgttgagcagcaccagcgagctgccgtttccttgcgaagacaccatccacgccgggaaggtcccccggtggacgtcccagccgtcggtggtgagcacgaacccgttcctcctgcgcgggtccacgtccacgctgaggctgctgctgtgccacgagttggcgttcctgtacgtcagcgagacgttggttccggtgtccccgtcgagcccgagcctcgcgccggggagcagcgcgtcgccggggtagtcgaagctctgccacaggacccgcgacgacgacgacgacgagttggcctggtccctcgccacgaccacgaggttgccgctgtcgaggaggaccgccgcgacggcggatgccgccgatgcggcggcggcggcgcccgccacgcttgaccaccagaggttagtgccgttctccgtgatgtacaggcggtcgccgatca

SEQ ID NO: 9901 - DNA, 456 bp, Zea mays
tgccacattgtattcaagcacacaggacatcttattcagaatgtattacaatttatgctctgttagggtgaagaaggcaggcagatcgaaatgtaacaattcttggggtgtaaacaacagaaattgttttcgatttgggtacaaaactgatccaatcaccagctaaatgtgcctcctactacaatgcataaagttttcgtttctgcttagcactcgaggcacgtgaacagtagcttccacacaatcagtatgttctgttgctgcagcagtttagcatactaccgaggaccctcgttgaacgttaattgctggaacagctttgcttgtttggtgaaatatacacaatgcaaaccagtgggggtgctccaatgtgctaagatcccataccagccacccccttagctttggctgccgcctgctgtgctgccgcggcggctgctgctgctgcagcagcag

SEQ ID NO: 9902 - DNA, 539 bp, Zea mays
tgttgaagctgacgagcagagagtgagagtgtgtcatgtcagtacccagtaggtcgcagcaacagacaaaaatctgctttcgttcgtactgcttactaatctgcagcgtccagatactggagagctttcgttcatccaggcgctgctgaactgaaagatgatggtctgcttcacgctgtctgcagggggaggaagcgagcagggagcggacgtggcggcagagcggctggagcgcgacgtgacgtcgcccctggccacggtcccggtggtggacccgacggcggcggcggcggcgacgacgacgcagtcgccggccaccggcgggagctggtgcgtggcgagccccagcgcgagcgcgacggcgctgcaggtggcgctggactacgcgtgcgggcagggcggcgcggactgctccgcgatccagcagggcgggagctgcttcagcccggacaccgtccgcgaccacgcgtcctacgccttcaacagctactaccagaagaaccccgtgcagaccaggggtaccgagctcgagattagtg

SEQ ID NO: 9903 - DNA, 474 bp, Zea mays
ttgtacccctgttacatatatctttatagaatatataattattgctactcttacatactattcggtgaccagcttgagcacggttttttgttgtattatattaattggatctgaagcatcctgctcaagtcgtcaagtgtgggtgcagcagcaaacagcgatgtgcatacggctcgtgcacctgaaaccggagagcttggagtggaattcctcactgcattttgcctcgcacacggcgtcctggcatgtcgggtactgctggtagcaatcctctggacatacgtatatatataaattaaactcaatggatcagctagcagaagtacatgcattatttgcacactgggttttaaattaaccaatttcatgcatgcatgcgtttatatatacaatgtatgtatacctgctgcccaggtgggtgtcgtcatgagggtgcaagacatgaccatgagaagaaggatgcaaatgccagca

SEQ ID NO: 9904 - DNA, 462 bp, Zea mays
tgcagatctttctctgtgttcttgtcgatgttgacgctgaggactaggcttctccggcagatgaactggagctctggtgttgcgttgtggaagcctgctatcttcacaatatctcccagtctgtatcggtatagaccttcacagcccaatagcccatatcaaaaagcaagaacattaaacatgtgccatttcgatggagaaacatacaaacttccatgcaaaatcatgaattggaactgcagtgcttgaatcctactggagaaacagataatgtatgtacctgcaaaatttgttattacaacttcgtagattttgccaacctcaacctcagttaggcctacaggctccgactctatgtagtgaacagaggaacagatctccgtttcctcccattttggtttttccagaggaatgaactcgaaataagcaatgttaggaagaacagcgtacgtcacctcctca

SEQ ID NO: 9905 - DNA, 514 bp, Zea mays
tggtgtcaagcaaggactctgtcattaaagatctgcgtgcctccaagagatcagtcgcccaggagctagaggtcgctcgactggctacaaaggttgcagaggacaactgcgctgttttgaagacccaacgtgacaaggctatggacaaagccatccgcgcggggcgaatcttgatgagaaggcctggtgtagttgttcctgatgacattgttgcggacgtcaaggctacacctgatgcttcgagtcgcccttcatcctcgattgctcctgtgaaagacattgccaagtagagatgttttgctgtgtttagaagactttgaatgcatttgtgaactatatgtatgtgtgatcagcgcgcttgaatattcggtaggatattagaatgtgttcttggcgctaaaaactataacattttgtttctgttgttagaattcaacagttgtcatgaatgattgtagaagtaagtgcagtgtgctggttttggaatcttttcctaatttatgctaattgatca

SEQ ID NO: 9906 - DNA, 497 bp, Zea mays
tggtcgcgttgccgtcgcagggcgcgccccccgtcgcccactggttcagctccgccggcgggccgccgtccgggtccggcccccgcagcgtcgcccggaactcgctcaggacatcggcctccgacttggcctgagccgccgccagggtgacgccgctggacgccgccgcgaggatgagcgccgccgcggccaggagcagccgcccggccgccgtggcggcggccatggacacgtacgggaggcggagacggatgcgtgtggcggcggcgacgtgcgtgcgtgctcaaggggtggagcgcgtgcgcgtgcgcatgggcatggcgcggggaggatggcgcgcgggcggacacggctcccgcgcaggcctcgtggcgggctaaagaataggggcgggggctgtgttaccgaggccggcgcgtttgggagtcgccgctgccaccgcgacgtctttcttgttgccatcggtaaggtaacaaacggaggttctgctttcatca

SEQ ID NO: 9907 - DNA, 561 bp, Zea mays
tggagctcgtcgaggagcggctccccggcggcaaagaagggcgacggcggcgcgttcccggcggcggccgggctcatgaggtcggaggccaaggcctccgccgccgcgccattgctgacgacgctgttggtcctggagaagaggggcggcggcgcccaggacgagggcgacgagaccgagagcggcgacggcgcggtgccggcgccgcagcgcccggagttctggcgcgagaggaggaacggcgagtgcgttgcggcggcggtgacggatgtgggcgtccccgggcctggcgacgggagcaggcccaggtccttgcgcgccttggccatgacggtgtgcagcagcgcctcggggccgaaggcgaggcgtatcatctccttctcgccgtggtcctggatgagcaggaagcccatgatcttggcggcgtggtccgggtccagcgcctggatccgcgagaacaccaccttggtggcttcgtaggcgtccatggatgcagccgcaagcaagcaagcaagcacggcgcaccggcaccaccagagagagagagcttcctttttcgca

SEQ ID NO: 9908 - DNA, 493 bp, Zea mays
tgaactcgtgttgttaggctcttggcatcgagtgggtgggagtggctaacctcgcgcgcggcccagaatatggtggcatttttaatttcccatttggccaaccgatgcatagcctagcatagcctcgtgctcctcgtctgttcgtctccctcaggcggtcaggcctcagcaaagcttcgcgtgattttcatcttgtagtctgatcaaatagaacacgcaacagtttgttcctatatacgcaacgctggtcattgtttgctgccattcgttccacgtacgtcgtcgaaatgcacgaacgaaattataatgataaaataagaacggtttcaaccgaattcagttttgcagtgcacttgatattcttacagctccgaggccgtcagaaagcaattaagcggcctcacgtcaggcatgcatctaaagctcgaaccaacaatagggacaacaacaccgtggcacgtacattaattatataccaccccccggccctgca

SEQ ID NO: 9909 - DNA, 487 bp, Zea mays
tgttgagcttgttgagttactggaagcctttgagaaaagaccgcctgagtgcttgcggacaaatacactgaaggtatactgcctgtggtcaatctgaaagtgtattagtggtaccagtactacacaattatttggtttagtgtttgttgtcaatttgcttcatatctgcttggactctgctattctcaataactttatttaccttatttatttagctacggttgcaagttactataacctgcttggatccaaaggctttgttgttattgcatttgagttattggtgaattttgcactttgcagacccggaggagggatcttgctgctgctcttataccaagaggatttaatttggacccgataggaaaatggtcaaaggtatgcttcaagtattgtttcccatacatggtaaactgcaacaaacttaccccatcacccctgctgaaaatgacaggtaggattagttgtctatgactccaccatttca

SEQ ID NO: 9910 - DNA, 530 bp, Zea mays
tgcaaatataccgcttcctgtcatctccttccacttgggagcagagcatggtttcctgaagggggaaaagaacagcttgtcatctccttccactcgggtggtactctggaatctaaataaccaatgaaactacgacatacgcagaacttgccgaaacatacacagaccaggagcgctgtgatcgacgttcatcgatagtgcacgaaagccagattagtcgttgtcgtttaaagagtgcaagtgatctcaaatggaactattggtttcacagctcatcgttagtcagcataccttacggggagcattttgatggctacggtcagtttgcagtactccaacatagttggtgagatggcaattccatgaagggctaaaccatagtcacattacggtaacactactagccattccttttccagagcctatagaccagaactgaaaaaagaaattctacaagaaccgagttaaaagactctagggcgcatatcgcagcaaacctcaaacaaatccaacgaagttctctacccgca

SEQ ID NO: 9911 - DNA, 571 bp, Zea mays
gaaagaagaaggtgatgccttcataagaggaaatggtggtgcggattatatgatgtgaatattctgagatctatgtcgggcaaattcttgtagcagtcttctgaatatgcagttctgtacatcagtatacccaagcgtacccttgcagacaattaggaagatggtgaaagccaaaactgctgctataaaaaaacacaagccgatggattaaagccgcagcgaacaggctttagcgccggtctggcaaaacttggtcgtttatgagagactttaatatattgtacttttttgttatcattattatgttcatctggcaaaagaattgcaaaagggaaaaagagaagataaatgagttacatcgccatggccatcaagatatctggtaataattgggcctttagtgatactgataaggtgccgttgtctactactgaaatgtctgtatctcaattattttgtgattcaatacgagattaccaatatgtggctaactgcaaaatcactgcaggtcattgtcattgctggatcctcgatgttgccctgaagcatcggcccggccttgttgtatgca

SEQ ID NO: 9912 - DNA, 474 bp, Zea mays
ggccccctgaaaaaccatgtaaacattgatttcatcaatttggattgtcggctagagacctccccaacacttatcaatttaaaacagaacatttacacatgatgtctctggttatttttttaaatgttttccatcgcctatttggtcaacatttcatacaaaggaagcagtgccgtgttgatcatgactgaactatgtgaattgtttaattttggtagcaaagggtaatctgttagtgctcagtccagaaattggagcatccatgtgctcatttgagatttttaccgtagcacttctatacgaataaaaaataaataagtgattcccaatgtacgactcatgtaattttatttgaagtttgtttgcatccatttaattctctgcttataagttcttgttattttcaattgaacatctcttaagtgtaccttgaagttaatacccttgtaaaacaatccagcaactctcaactca

SEQ ID NO: 9913 - DNA, 499 bp, Zea mays
ctttggcttttaagctgccctctccagcctgcgctccgcccggcacctgcactcaggtcgtcacccaacccacccagcgtccagtctccagtgctcggctcgcctgctccccaccatcgtgtgcaatcctcgctcccttcttcaacaacaacgccctcaaaggctaccgctccactagcttcaccactctcatttgcagattgcaacaccagcaactcattgcagctttcaggagctgaaacaacgagtggcagtgtgggagagcgcacggtagcaacttgagaaagggaagcaggagcgaaatgggtgctgcgacgacgctgcccggcaacgccgggcccgtgcgctgctctcgcacgttcctcgcgctgctgctctgcttccagctactgcacacgtcgttggccctcaaggtaagtggtacatcgatgtgcacgcacgcccattgtttggctgcatgcgcttccaggagcaagcctaataacgacgatgcgtttca

SEQ ID NO: 9914 - DNA, 480 bp, Zea mays
tgttggcaaaaaactgatggctggatctgcaaatactgtgaaaaaggtatagtgaaaagttccttaatgaaagttgaaaagttccttagtgaaagttatttatgcaatctttatagctatcttcctgtaaaaaacatgtttatcgcacatgtctaagttcccttttcatgatgaaaacatactatgactatcgttttgtttaataacctgtaagaaatctgtgcagagggtttgtattaacagtggtaatcatctggttaccaccaggttatatccagactagcccttattacccctccttttcttctttggttgtttcaggtcctgaatacccttgaatgcctactttacttactgtttcatgtacatgtaccaatcatcaaatcttgaaaaaagggataaatccactttcaatcataagtcagccaagaaaaaccagtttctagaagccttctggtgcgcggtggtggttttggacca

SEQ ID NO: 9915 - DNA, 549 bp, Zea mays
tgccaaggaatatgatcttcacttactgccttgggcttctgttgctgcttgcatctccaacacagggcttgaggtaatccctgattcattttcaatttgcatctccagtactgacttaggttgccagaggcctgtgttctgtcctgtagtttggttgctgaacaatttttccctcctaatgcaaattgcacaaagcgcttgaatcttttctatgtttctgaaccgcttaattcttcacttttttccagttcgttttctgcaagcagaccatgtcaccaactcaccatgactttagagtagagaccaattattcatgtatgtaatcatgcagttgtctttgtgattcttagtcaactgaattaaatatgttgttgtgatatgtcacctttgtttacttttgtctgacttctcatgaaattgccaagagtcatgtgataggcccaacttgcagagttcataggtattcttttggtagggatcaagattaatgtgatatccgtcagtgaacgattgtctttgtggttttgcaatttgtgatttgtggcaaca

SEQ ID NO: 9916 - DNA, 465 bp, Zea mays
tgaacgccattactcgctgcgcagtttgtgctggaaagttccactagctaaattctcgaacatatagggggcgtttggtatgaagagttaatctattttatagaggagatggtgcattacaagtcaatttcataaatttagtagaataaacttatttatcatattattactaattagtagactacgagaaataaaatagtgatggatcaacttattgcattcaacaaaccaaacaagaacgtgagaactgataagacgatggaataccttatttcttgaaccaaacacgctaactcgttcgcttggtctagaatcgatgcttcggtcacgctgcaaacgatccggcgcgttcgtgtctggcttcggagaaaaaacggcaaatgcaatgaggcacactctttgccaaaaaagattcatgtgcgttgttagactgtagttacgggatcagatcagaccaactcggca

SEQ ID NO: 9917 - DNA, 450 bp, Zea mays
tgaaacgatagctttatttatatcactattggtacagttagatagaaaagtttcaggcctcaatcctaagtaaccgaccccttacatatttcgaacttctatttacaggcctaggcaacaacaagctacctatagtgcaccggcagagcccatgctcgccgttgcacgggctgccgtccctaacggcggcagatgtcttgcgtcgtgacacctcccgcatccggcgccgcttcgcctcacaatcgtccgtggtggcttcttttgcgtcggccccggccccggcgccggcagccaccataatccccctagacggctcaccggacgcgggcgcgctggactacaccgtgaacgtcggctatggcacgccggagcagcagttcccgatgttcctggacaccatcttcggcgtgtccctggtcttgtgcaagccgtgcgccccaggttccagca

SEQ ID NO: 9918 - DNA, 537 bp, Zea mays
ctgctgcagctctggcgacggcctcgctggtgcgacaacagtaaggtgggcgtccacgaacgcctcgatgagctgcgcgccgtggtcgttgagcagcacgccgagctcgccgtccgggcccggacggacctggccggcgaatgcccggtacacgcccaacacggcggcgaggccgtgctcaatgtccgcgatggagggcaccggaggtgagaaggcgtagatgatggccatctgtatgtggtatgtgatcttgtcgaacaccgagcaaggcacatgctgggtggtgtctggttgcggcacaccaggtggataggacggcttgacaagcctagagctcatcaccttcacctccatggcgagcgatctgccggcctgtgcaaatggctcacttgctttgctcactcacctcttcgaaataaataaaactctttgaatcttatttatgtgacactacgatactatctatcactagtgcatatgggattgtcctgaacagttttgtttggttgcgcaactgcagtgttgttctcttgttca

SEQ ID NO: 9919 - DNA, 549 bp, Zea mays
tgctcgtctttgcatttgcgcactgccatggccggggacagacagtgcaccgtacctccctcgtcacgtacgctcgcatcggcggcaccagagagactgctggcaatgcatgggttttcgctttcgcggccgcggcagcttgccgggcctattcccggaaaccgacccactgcactgcaccgactcggcgcgcgcggtcggcatattgccatcgtcgtcgcggcgcagttgcctctgtcaggtcgccacgccatgcatgcgtgatgcatgccctccattgtttggctggtctctccactgatcgatatctaccctccccatgtatatgcatgcatccaaataaagcagcgctgcataccacgcaacggctagcttcttcccctcctgctgccctatatacgtcaccttgctttgaccgtccggacgacgctcgcaaatcgcaatagcacaataccaaaccacgatacatgcatgctgcactatacaaaacaagtgtggttacgttcatctactacaaagcgaagcgccaacaaactaacgccgccagca

SEQ ID NO: 9920 - DNA, 564 bp, Zea mays
tgcgtaacagtcccgatcaccctgacagccgccaactcgctgattcaggaagtaggagttgtggttctctcttgagaaccacgcaaccacgttcgctacgaggaagagagccgcatagaggtatctgacgttcatagggctgaggccctggcagaagaagccacagttcatcgtcatccgtgctttgcttggctgcctgcctgcctgcagcggatatatatatatttcattattcacagtattgctatattttagagaaataggattggcatatacataaatataatcaaattagctactgcatgctagacacagtggcggagccggccggcataaaactgtcacccccgctgcgctgcacctgcatgccgtccgccggagcaggcgattggggcatccccgcagctacatactgctagctagatccatagatacatatggtgctcacctgcagagatgcactgaacgtggagaagaccactccaacacaacgggcggggcgatcaaccaacagtagtgcagtgtgagcgcgttggacgagagcgagaggcgagagatcaagca

SEQ ID NO: 9921 - DNA, 555 bp, Zea mays
tggaccctgagaatgtggtaagtagtgtcatggaagtattgcttaatgacaagtttaagcaatggttgtcatccaaatgtgaacagaatattgatggagaccatttgcttcctaagcaataccgcaatattatacatacggttgcagccttgggatatgatttggctttgaagccactgcttagttcaggagtgcctataaactaccgtgatgcaaatggatggactgctctacattgggctgcaaggtttggcaggtatacaaaactcttcacatcatatgcagcataatgctattttttcatgttcaagtttcaagttgatctttgacacaattttttttttctatttaccattccttgtattcattgccaggagccttcttatttttagacctagacacaaagttttacttgcacaatttaggcagttgatctcttatgtaatggactaatggttttctctaagctgtttttcttactgacttcatcgtagtattttctatttaaaaaacagagaagatatggtggtggctcttcttactgctggtgctgca

SEQ ID NO: 9922 - DNA, 557 bp, Zea mays
tgctgctgctgttgctgcccgtgcccgcggcagcgcaggcgtccgggcgctcgcacagcgggtggccgcacggcactgtcttgctcgtggacgactggctcgggctgtacgtccggtccgtcgtggcgttgccggtctccgcacactgcttgcattcgcagggcagccagaagaggtcgctgccggtgtccagcgccaccaggaacttggagctcggcgtgcccacctccacctccgcgtagtgcaagctgcgaacgagattccattattattacatgtagcaacaaccaacaagagggcaagatgcttgagcgatcaatcaatggtggcacggcaggcgcgcgactacgcgaaagcaaaggagggatcagcacgtactattcgtaggtgtcgaggtgagtggcattgccgtcggcgaaggtgagggtgctctggcggccgtcggcgttggcgaggccacggcggcggcgggcggagagggcacggtcgtcgtggcggagcagcgcggagtagtactccggagagccttgcggtactgcctcctcaggcaacgacca

SEQ ID NO: 9923 - DNA, 330 bp, Zea mays
ttacaagtcatttcaacttttcgaatataatttctcgtaagatggattttgttttctcgatttgtaagatggcttgaaaggacgtggattccttcgtagttggacacaacgtggactcctttctgttggatatgaatgttaatccatcagcaggtctgtctagtgctaatcctaatctccttggaattacaattaatattccatttgtatataggatgagtttacagagcggtgtgcaaagtgttttccatctaagaagaagcagggagtctcagtccaagaaagagaagaataacacggtactggtaatgcacttattagcacctgaca

SEQ ID NO: 9924 - DNA, 498 bp, Zea mays
tgccaactagtgcttcgtgggagcactgtatatataacgaattactcggcaggtgccaagcacgcaagagctgttgccttttccgatggaaacaggggctcggggcagggacagggcggctcttgcatccagcaagttgcgggcacaacgggccaagaacacgcgcctccggaatgtttctttcacacacgagacgagaggatcggaggcagcgaggaagcagtgaagcacgcggcagcagcagtaccaaggccctggttcccaagaacacggaccagacaggagcccttgcttctcccaaggggattgaggcaccggcaccggcggacaggctcgcgacgagatcacacaaaacgcagagccatgccgttctagggagggagactgactgacagaacaggcagggtccaaggagcaggagggacacggggagcggcgcggagaaagaaagaaagaaagtcagagtagagagacaagggggaggggagcacgagacca

SEQ ID NO: 9925 - DNA, 528 bp, Zea mays
tgccagaaggcgtcgtcgggaacgcccagggtggtgagcagcgttatgatctggcggttcaagaacgctggctggaacttggtccaggacaccacttccagcacggtgtgcctggactggaacttcctcatgctgggccgaagcgacatcctccgcgttccacggtcttcctgtcccggccccggcggccagacagccacgacgcccttgaaccccgcgtacctgatctggtacgcggacggggcgaacctgtccgccagcggcagcatctcggcgacctccagcgcgaggtcctccgtgatcaccccgatcccgtcggagaagttgtacccgttgcgcgtaacgtcctcgaggtcctcgtccacctcgccgggctgcatcgtcaccgtcgcgtaggaagacgtgaagcacagccccatccgagcggcgtgcttcgcggggttcctgatcgggaactgccccatccactcctttatgcctgccaccgttgtcgctccgtcctccgcgaagaaccaggccgacttctgc

SEQ ID NO: 9926 - DNA, 475 bp, Zea mays
tgccgcatgcatcccacggccagtacggccgtccacttcgcaggcggccgtgcgcacgctggtcccttctctctcgcggagcatgtggcggcggcaggttcacgtccgcccggcgcagggaagcttcgtcggaagccgcggacaagatggatcgaggaccacgcaacgcaacgcaccgacggagatggaggcgggcgccggcgattccgttccatcgatcggtgtctgtctgcactgcgtggttggaacttggaagagtccacgacgtcgacggtgaaaattcagcacatgccatttctggggagaccgatgtcgctctcaggatccacctcgaagatcgtgtttacactacccggtctccgatcgacgggtttccggccactactagtactagtatctttcttctccgttctgctgcgcttcgttggaggtgggcgctcgtgacgttgaactttctacttcgaggatcgctcaa

SEQ ID NO: 9927 - DNA, 478 bp, Zea mays
tgcagcatcatcacgattccctccctacgttgttactacgacgcaaggcccggcaggctgggctcagaagaatgggttccattcgctggccaggccaacctagtatgccaagaaccacgactggccggagcgttcattcgtcgtcgatcgtcgacccagggcaaacgacacctccaaccactgcacgacgacgttttaatttaccggatgccattctctctctccccctcccccttcccttctcccttctcccttctctgtgttcttgattgggtgagacatggatccgaggatggatggacggcctgtacctgaggagttcccgggaagaagacgagtgagtgagtgagtgattggtagggtaggcgactaggcgtcgcgtcaggcagtacgtccttttggcgcctttttttcttctttcactcaccattggcgaccaccaatgaatgatgacactgactggggtgtcaacatcgca

SEQ ID NO: 9928 - DNA, 423 bp, Zea mays
tggtaatcaggtatcagaccaccacccgaggcagctcgtagtaggccagcaggaacaagctcagtacattcagcagagttcaacttcagaccagtggggatgctgccctccaaagcgacctcctgatccgaagttcgagccatcgtcatgccgccagaatgtggaggtgaacccacatgaacatccatagaagtgcaggagggagaccccacttggacaccctcgggggctgggtcaaggttggcactgcccacttgagccgggttacccccggcgacaccctcgggggctgggaagtggcctacactcttcacctgagttgagtcctccccgacgacaccctcgggggctgggcacatgtcagcaccattcaaaggatccaagctctctgccgtgaccacctccaaggtcgacggaccttca

SEQ ID NO: 9929 - DNA, 566 bp, Zea mays
cgaccattccatccaccaaagcctgataagaagagcggatgatcataatggcaacaattcacgcaacataaagatccaactaaagcacagcacagcacctggaggttggagaaaagcgaagggatccccaagtcattcaaaatcggctgatgaccaggtgccagaccaccactcgaagcagtttgcagcagaccagcaggaacaagctcagtacattcagcagaatttaactccagaccagtggggatgctgccctccaaagcgaccccctgatccggagtccgagccaccatcatgccgccagagtgtggaggtgaacccacatgaacatccatggaagtgcaggagggagaccccgctcggacaccctcgggggctgggtcaaggttggcactgcccacttgagccgggtcacccccggcaacaccctcgggggctgggtagtggcctacactcctcgcctgagttgagtcctccccggcgacaccctcgggggctgggcacatgtcagcactattcaaaggatccaagctctctgccgtgaccacctctaaggtcgacgggcc

SEQ ID NO: 9930 - DNA, 660 bp, Zea mays
ctggaccacgcccaccaatactgcaaaggatttaactttcttttctcagatgactctcttttgatccatattttagcttatcgatttgagtttccgattagctgctcagccgaattatacatttcactctatgattcgcttttttaatgctgctagttcatttcttgcatctgttgtgttgaccaatcctgtgtgccgcctcccaggtccttagtgatcccaagaaacgtgcaatctatgatcagctaggagaagaaggcttcaaggggcagccgcccccaggagcaggaggttctggcgcatttcccttcttccctggcggggctcattccaccgctccccattttaatcacaggagtgcggatgatatatttaaggagttctttggatcccctggcatgggtggcatgagagcggaaccaggatttcaaaggtcaatgtttggcaacgatatcttctcttcacgctttggcgctgagggttccaccagtatgcagcagccaccacgcaaggcagttgcaattgagaatccacttccagtcggccttgcagatctctacaagggtgtgacaaaaaagatgaaaatctcaagagagactattgatgccagcgggtaagcttcctcctctatttctgtagttggtcacgagctcggagtag

SEQ ID NO: 9931 - DNA, 445 bp, Zea mays
tggtgctagagatgagcgcgcgggacaatccggaggagatggagatggaggtcgccaagcagcttagtctgggcttctgccctccacatggatcccctgcggaggtcctcgcggtccgataccgggtcagtttctaattcagcactacttagcatgttcagtttcatcttccaatcacattgcatgacctattttcaattcaacgcatttgtttttcgactttagacaaaactagaaaaagaaggcgcgcttcgctgcgccctacctccattagtcaaatacattaacaaacttcatttagtgtgattcaaagtagacagtgcacactataaaatagactggttcggtataaaccaatagcaaagctcttttaaaaaattcagagtacaacgcaaaggaatgctcaattttaccattaaaaattcaagtatgtagacacaaaaca

SEQ ID NO: 9932 - DNA, 590 bp, Zea mays
tggtatcggagcgtagcccttctttgcagatattatgaggcatcttcaaaaggattttctaaaagtattacctagaaactcttttctcttcttacctaagtattctgaagagtctatcttaaagaccagataggaagagtgcaatgtatagaaggttgaatcaactaaggttgattctgtaattacacatgcatcatgctaagaattatactaataaaagtttcccccttagaaagatgccgccgcgcacaaggaaaacggcgcgcaagtcaactggaccaatcggtgtgccccgacatcaactagcccctcgacatgaggacagtagcagtgggagtaatgatccaataggggatcttgaagcccgagtaagttgacttcaagcggagttgcaacacaggactaatgcttgggttgcggacggagatagaataaatgaattaagaagggacatccgccacctgcgggatcagcttgctgatcgggacttggcgctcgactgggcagtacagtcccgtttgctggcttgtgctaaggaagcaagggctcaagcccgaatcaaggaacttagctcaggggtaccgagctgt

SEQ ID NO: 9933 - DNA, 523 bp, Zea mays
tgctgcgcctcctcctcctcctctccggctgcctccctacaggaaccaaaacgcctctctttttaaactgtattcgacaagaacgacatgtcacactcacaccttgctgttattccttcctttttcttttgaacccgagcgtgcagtgttgttcttccggttaattaattcaaggaacacgaccttgcttccttccttccttcgtcatcaatatatataccttggatttccgccggtgcatttgtcctggtgttttggctccccggcggtggccttctcgctgcgctcctcggccggcgcgtcgtcgagcgctgacagcaagttcatggtggtcggcggccggaaagctccttcttctcctgcgacgatgggaagagcgcgatcgatgtgcgataagcagaacggtattgttcattgacggtagtgttagtgtctacggggaagctagcttattcgtgcatggcagtgtggcacttaacggacaggagcggatcgcacgacgaaagaactgctgcccttacca

SEQ ID NO: 9934 - DNA, 440 bp, Zea mays
ttgaaggttcatgagaagaattatccaatccatgacctagagttggcagcagtggttcatgcactgaagacatggaggcactatctgtataggcagaaatgtgatgtttacacagaccataagagtctgaagtacatattcactcagtcggagttgaatatgaggcaacgaagatggttagagttgatcaaggactatgaattggagattcattacaatccaggcaaagcgaacgtagtggcagatgctttgagcaggaagagtcaagtcaacctgatggtcgcttatccgatgccttttgagttggccaaagagtttgacaggttgagcctcagatttcttaacaatatgcgaggagtaacagttgagttagagcctaccctagagcgagaaatcaaagaagcatagaagaatgatgagaagatcagtgaaattctgca

SEQ ID NO: 9935 - DNA, 515 bp, Zea mays
tgcttgccagagcttccttccatctctttcattatgacctcaaagggagatggcacgctagtcttggacgtcctagcttgtttccgaagggctgtcagagcctccctgttaccatttcttatcttatcattttccaccaactgatggtaacagagatcaacaaatcagaagattaatattgggattgtcatctggtatgaacaagaatccaatagcaaattagcacatatgaacctgatgtctagccagaagaactttttctgcatcagtctcaatatcaaccagagcctcttgaagctgcttcatgttgggatccattataaagctgaaaaactaatgtcaatagtttttttattattatgccagtaaattgcttagaagaacacaaccatcaccatattgtacactgtatatatcttaaagtgacatacacaatcttcacagtctcaagcgcagctacacggttctgaaaaaaaacttgcttgcacaagagtagcagtacttcttctccttca

SEQ ID NO: 9936 - DNA, 532 bp, Zea mays
tggataatgcatgatttcatataagagaataaagcactcaccagacgcgctgtgtggagcaggcccgttgctcttgacgttttgctgagcatgtgacgacgatcgctgcatgcgaggcgacgagtcatgcttgctgtcggtcatgggcaacgagtgccttttccttgggttgctgtcctgcacatctgggctcatcttcggggacgacgacgccttggctcttgcagattctgtaaattgcatgtagcttggcaacaggttgctgttgctgttgctcgtgcgaggttcttgttcgacgtggtcggatttagcagccttgcttgagctctctctcttgggatgtcttgattcctttgagaagttgtcggtgctgctccggccgattgagtcgctgccaggactagccagcgacctcttgcttgcatggggcttgggctttttgctcctgctctttttggtattaacagagacctcacttgacggtgtttcttgagattcagtgatagtcgttcggctcattggagttccttca

SEQ ID NO: 9937 - DNA, 551 bp, Zea mays
tgttttgcaggtaggacagaagagaggggatagaagaagaggctcctttttgccgtgtgagcaacagatttgatgtagcattgttaggcgaataaacagctattgtacactgtagaggcaaaagaaacaaataaacgtggtttccattttctttaaattttttggggataccttgggagcggcagaaatcatacattttgatagacataattcaatagggatttctagatacgatacttgtcaaaaaaaaaagaattcatggagaaacaacggctgtgataatggtttttttgtaggaaccttttctttatacaattatactattgattaattgttatactattactacattgttacctgattctccaactgtgtccagtgtttgacttctgcgcaatcacagtctctttggccaagttgtagatgttgcgcgtgccgctgattactgtactggcttgttcgacgagaaggcgtagttgtagtcgtggccgccgatctccccaacatgaccaggaagaatgagccagcctctcgcataattccccgctgca

SEQ ID NO: 9938 - DNA, 460 bp, Zea mays
tggaggcggagctgccgctgctagagacagactcctgcgagagaaactacctgcacgtcgttgcctctaacaggggtgtcgactggcgtccaaatccaagggtggaccatggggttgtcgcaggaggcgacacgcctcgcttcatcatggagtcggtcaagcagtgccgcgggccgcccaagctcttcgtgcttgacaagtaagtacgatgacccctctatctctacttctctagtgtgtgttagcgactgagaagacctggatcatgacggttgcggcatcgttcattgtgcaggtacgatgtcggtggcgacggggcgtgcttgaagaggtacaccgacccgtcctccttcaggacgggctccgcatgtcctacgaccttgctgcaggaaggaactcgagatgaaagaagacctctgagagccgtggtaataaacaaaatcaggggtaccgggctcta

SEQ ID NO: 9939 - DNA, 509 bp, Zea mays
tgcatgcagatgttatcaagtatggttttaataacaatttgtttgtggcatcatctcttgtggatgtttatgcaaggtgtgggcagattgagaaagcctatctagtatttgctgacatgaaacacaagaatgttgtcctgtggaacgcaatgataactagttttactaggcatggtaaatctttggaagcaatgattctctttgagaaaatgcagcagtcagggatatctccaaatgaagttacttatgtctccatgatgtcggtgtgtggtcatgcaggtttagttgaagaggcccgatgctactttgatctgctggttactgatcagactgttaaacctaatattgttcactattcttgcatggttgatgttttggggcgatctgggaagactgatgaggcttgggaactgattcaacaaatgccatttgaaccaactccttctatgtggggatctttgcttggttcatgccgtaagtacaggaatgtcggaatagccagactagca

SEQ ID NO: 9940 - DNA, 472 bp, Zea mays
tggagttatgacaatccggtcgacatctgcattgatccaaggtgtcaaactttgaagcgataaatgggccagcaaagtggtagtggccttcatctatgtgcatcccattagtcataactataaaaaaggcaaaggtgtaccaacaaaatcaaataaacatgactatagacttctagggctaaaatttgcaaagacaatacaaaaacatttcagagaaacgaggaatacagatcagagaacccaaaatgcctaaataatgataaactggaaaagaatacatatttgagaatccaaagaaagtaagaaaccttcgccccctacatttgccaagctattctttaatgaatgataaattaaaaaggaaggtgcagctctaccagtcttatatgctgtgttgctagctttggatcgtagaaattctgaagatccagattgctcagcagtcagcacagaggatagagcagctacagca

SEQ ID NO: 9941 - DNA, 547 bp, Zea mays
tgcccgacctccaaggcaacggtgctgggggccccggcgcctcaggcggacccagctctctcttcagcctgggtttctttgctaacaatggcaacagcagctcggggtccagtcacgagcatgcaagtcaggggctcgtgaacagtgaccagttcagcggcggcggttcggaggcacaggcggcggcagggatttttggcgggaacttcgttagtgctggtggagatcaagttccaccgccggggctctacagagaccaagcctccatgctgccgcagatgtcggcgaccgctctgctccagaaggcggcgcagatgggcgcgaccacgagcgccaacggcgccagcgcggcgtccatgttccgaggcttcgcgggctcttccccacaacacgtgcggccagcgacgccgcacatggaacagagcgacgcgaacctgaacgacctgatgaactcgctcgctggagggggtggcctcggtgccggcggaggaatgttcggcggcggcagcaacggcgccggccacgcgggcatgtttgatccgaggca

SEQ ID NO: 9942 - DNA, 515 bp, Zea mays
tgaaagagtaacaagagatttcggcctccactcatgctgacagagaagaccgaccttcccggagttgctgaatctcatctttagcaatgttgaaggatcaagggcatgggagctcccaactgtgaaatagttctctctggtcttcagcttgtgtgttacctcggctgcaactgtagctccattggtcggattgaacaaatgaacgtaagatgccttcaaagtctcccctttatcagccctatttattagcaaaaatgtggaagagtggtcagtgcgctgacaaaagagagatcatcattcgtttgttaaacttgcccaaaaataggtgagaaggaagaagaaaatagcatgctacgatagaccaaaggtttaactgttcacaaaatcacgagcaatgtataaaattacatgcatccctaagcaaaaaaacatagacttgcggagcttacagtagtaaggaagctgagaaatcggacttgttgtatccaattcctgagttgtacttagtaacagca

SEQ ID NO: 9943 - DNA, 473 bp, Zea mays
tgcacgagagatgaggaagttcagtacaatgtcatggactcggcaacctccttctccacgcatttcatatcttgaacgcaaggttatgggctgaaccaaactcctgttcacaaactcgtagaagtagccctcggcaacctgctccaaagtaaagccttgtgtttcagcgataaacccttcagccatccatctccatactagagcatctttgtaaatcgtgtggtcctctggaaatgtactgagatacagcaaccaatttctcatgttgtgaggtagatccctgtaactcagagacagtatcttgtccatcacttccaggccactatctttcttgtgcatagaatggattgaatcaagtgccctctcccattcttcccttgttctctgtttagtagctaacatgctagctagagtaacaatagccagtggcaaaccatcgcatttctcgattatctcgtttttaatctcctcca

SEQ ID NO: 9944 - DNA, 488 bp, Zea mays
tgcagcggcgccaagaagcagagctgctcgctgcgtcaggggcggcagcagaggaggcgcctccgcgtcgcccgcgccgtcgaggtggacgcgccttccgccggcgcgccggagccggaggaggcggaggagccgtccgtcgacttcgcgttcgtcagcgtgagttcctgtcgcgactcctcttttttttttcttttggaatcgccgagatagagcgggcattgcgcgcgcacgacgtgcgcgcgctcgtgaccggcggtcgacttggagcttggaggccgccgcttgaactggtgcgcgcgcgcgcttgtgatgttgcagccgcggctgctgccggacgggacaccggacgtgcactaccggacggcgcgcggcgggcagaagctcagggacatcatgctcgacggctacatcgacctatacgggccctacgtgagtcactgcacgcgcgcggcgctatggccacctgtctttcttttcttgcatca

SEQ ID NO: 9945 - DNA, 933 bp, Zea mays
tgcattgacaacagtagaggttagcagcacataaacggacaaatcgcctgcataggaacataatatctacagtagatactatattgtgatgctatcatatagacagacaaacatacccattaatatcatgatgcattattctgcctatctagagtaagtagtcatctcatgtaataagggtgtgttgggtttgcgccctcctaggagtgacagcagccacactgccacatgcatccaaaatcggacgcttgggatctctgcctgtgcaagttatattgagtgataatttgcttcacactatcggcaaattcatagcagatagtagatcagaagttctttgaagtggagtagaaggcaacctactacacaatattaattgtttttcctctagctaagcaactagtcaagtgtgtagccgaaaaaaaggtgccaataaaaactaacaaaaacccgcacctgtcaagacggcaaatgggagatctggaagctttgctgagataacgctttacagaatgagttaaagttgggtcattttgcttgtgtgttaagggtgtgtgtgtgtgttctattagttcatagttattaccccattttccttcttaatataatgaataatgatacatggctctcatttgtgtttgctaaaaaaagtggcaaacactataaaaatatagatggacattaagcattagaagaacactggccatgtggagatggtcgaatggaaagaaatgatacaaaagttggaacatgtcaatttgacagatggtctgagatcaagtgctagctagaaaaatctgtgaaattcagtacaagatcgttgtatagagacagagttatgacctttggaaggtagcaatcaataaatgatggggtagaggactaaaattcccacgagttctaaattttctaaccgtctttcatgataaaatt

SEQ ID NO: 9946 - DNA, 530 bp, Zea mays
tgtgagacatacaaggtaatatttatggtagcactaacattttttaagaagaataagaaagataatgttggcagatgtgctaatgtgacttgatttttttttattgtttcttaatttttttatatttgaagtatcctactctgatcaagccttgtagaatatcggtaactgaagataaatttgtagaagtaatgtcaaatgatgctaccatgttgtgctatttagtagttactaaacaaattcattcctgatatctgcactacttactttatctgtttcatacaatgcatccactcttctgtttaacctttacagtttattaggttgtcctcaccatgttttctccctgcactcatgtccatttgtttcttctttttcgtgacatgcaagttaggtctataggtatagtaagctatatagtgttgtagttgaataaataacattaactttgggaccttttccaggcatacaggaaaaggaaggagcctgatgtagagaagcaaaaggaaccaattctagagcatgtcaca

SEQ ID NO: 9947 - DNA, 503 bp, Zea mays
tgccggcgacgagcaccgagttgttgacggcctggtagttgctgttggcgtaggcggtgatgaccacgttctcctccatctcctcctcctcctcctcctcgttgtcctggtggccatggccttcgtcgtgctcctccgcgtccacgctgccgacgacgacgaggtcctccacgtcgcccgcggccgccgcctccatggtggcgccgctgttcttcccggccagcgtgatgacggtgccggcgttctcactgccgctgccggtgagggcggtggcgaggtggtcgttgagcttggccacggcgctgctcacctcgctggccacggcgacgttgtcgttggacgccattgattggtagctagctagctgtttcttcttcttgcgatcgagtttggtagaatgtgtatcgcaaaatgatgatcgggatgtgcagtggtgctcgatgaactgaaaggctagctagccttggccagcaggatgctcatatatatatgtggatggtgca

SEQ ID NO: 9948 - DNA, 572 bp, Zea mays
attcgagctcggtaccctaaagaattaccatacccagatgttccatctccagtttcagtggttacaacattagctgatttcttgtcctgtgtgaacttgcgatcagggcactctctagcccaatgttgatcactgccacagacaaagcaacctccctttcccttgttattgttgttcttcttctttttaaactgtgctgtttgaacaggtttattcgcgttctctggtttgttctgggttttcttcttgttaaacttgcggaagtttctcttttgcaccacattagcagtagaggtctcaacaccttttccactgtcctttgttctagccctttcctcaacatcaagagtaccaatgagctcttccacattgaactcttgtctcttatgtttgagagaggtagcaaagtccttccaagaaggtgacaacttggcgattataccgccagccacaaacttatcaggcaaaggacaaggaaaaagttcgagttccttagctagtgcctgaaactcatgagcctgttccactacagatcggttctcaaccatcttgtagtcatacagggggatcct

SEQ ID NO: 9949 - DNA, 476 bp, Zea mays
tgatggtaaactgcttgctactggtggtcatgataaaaaggtgtgatcactaccagtctaccacataactatcatttcacaatttttagagagagcttaaattactcacctgttctttgtacaggtcactttgtggtgtacagattctctgaaccctaaatcttatctggaagagcactcgtttcttatcactgatgttagatttagcccaagcatgtcacgccttgctacatcctcctttgacaaaactgtgcgggtttgggatgcagataatgtatgcccttcattagtttcctggcaatactgcatcaggtgtcccacagctcggaacactaatgtctaattgtttctttacgtgcagactgactattcactacgaactttcacgggccattcagcaactgttatgtcacttgattttcatccaaataaagaggatatgatatgctcctgtgatagtgatggggaagtgcgca

SEQ ID NO: 9950 - DNA, 583 bp, Zea mays
gcatgtcggcaggccgtctctagaggatccccctgctgtccgttgcttgcctaaccattgcagccaagatggaggagactgtggttcctcgacgtctggacattcatcagaatcaggtggacaaaattggatatatagtacagtttcacgtttgagttctccaaatctttatctttattatatatatatatgtcacaggttcctagcgagaagtacagtttcgatttagatgctattcagaggatggagatttacgttctagactctctgaattggaggatgcaagctgtgacgccattctcttatatcaactatttcgtggacaagttcactggcgagaagccgctaagttgcggattcatttctcggtgcaccgatatcatacttggcagtgttgaaggtacatcagattacttcatgcatgagcgaatcggacttgcccgccttttccattcgataagcaattgttgctatatgattggaacatgcctctaaatagatgtatatgtgcatttgatttgcagcaacgaagctcctacagttcaggccttctgagatggcagcagcagtggttctgtcagca

SEQ ID NO: 9951 - DNA, 427 bp, Zea mays
tgattaataggtctaaaatagattcgaaacagtctgaggtagttgctattacaatacacacacaaatatgtatatataatggtgctaaacattcagctatgagcagcaccatccatctccttaagccttattgatcagcttagaagacgtgcaaaagaatcaggcatcaccaccgccataaacatcacctggccactgagcaaaataacaggcaaccacctaaggaattcacaccaaaacagccagccaacaacaccacccttccatccacaaaagagtacctggttgagcctaaaacaagtgcaaaacatatcagctaagtacaagttgaaacaataaaactaatgatatgtgaatcacctaatcacttcacagtagtgttgaatcactcaaaaacttgaatacccatgactgaaatgttgtttca

SEQ ID NO: 9952 - DNA, 532 bp, Zea mays
ccggcacctttggaatagttttatattccttatgtactgttttcaaggatattgcctcatctttcaatttatttcatagaccccattttttttttacagttttgctattatttgcgacagttttagttacctaagttatggtctcctgagatctcaagtttccaacaacggttaaatttgccaatttggtatcctgttaacagatctttcttggggggcatgtcttttttgttttttcttgttcttatgctggctgacattaccaatttgctatcctttaaagccattactatctggggcattctggatctttgtgtttagtgcagtgattctggtgaaaatgtccttaactgagttctgttgattattagacttcccctggttcatggtgtctcacaggtatctctgatgtcggagttgccaaattgggagatggactggcatctctgcagtcccttgatgtttctcgctgcataaagctgagtgacaaaggtttgaaggcggttgcactagggtgcaaaaaattgagtca

SEQ ID NO: 9953 - DNA, 449 bp, Zea mays
tgaagcatgcgctcatgacggcacccctactacagatgtctgacttcaccaagctcttcgttgtcgattgagacatcaagagttggatttggcgtcgtgctccatcaaggcgacggggtgatcatgtacttcagcagggctgcggcgccgcatcatcagaagctccttgcttatgagcatgagagctcattggtagccctacccgtgggctcacaccttccgagtccgaacggatcacttcagtcttaagttcctcctcgactagcggctttccatgattccttagcggacgtgggtaagcaagctctttgggtatgatttttctgtggaataccgtcgaagtaagcttaatggcgctggcatgctgcagatgagatgaggcagaattggttgtttggagtttgtcagctccggcctttgagctgttcgacacgctgcatgtcgaggca

SEQ ID NO: 9954 - DNA, 560 bp, Zea mays
tgctccttagtgattccgatgactgccagagagcaagcatgcattcagatattagaacatgctctaacatgacacaacccacatagaaaacaaaaaaaaactatgtcaggcttacatttctcctgctcctgcgctcgccagccgatgttctgctccttattgactcagatgactgtcagagagcaagaatgcattcggatatgagaatatgctccaccatgaccaaaccagaatagaaactagatttatgcaatgcttacgtttcgcctgctcctgccctcgccagccgatgtcctgctgtcccaggtcaacctaaaatgagtgacaaactgtgatcagaaatttgcaatcgagcgaaaatcataaagcacctccttctgcttgtttgtcgacatcaaccaacctgacggtgtttccatctagcgaagagcagagtctatcagaccctgcattctggaaatcagccgaagagaataccgacaatggtgggaaccccagattactctcagactcctccttccacagggggatccctctagagtcgactgcaggcagcagtc

SEQ ID NO: 9955 - DNA, 489 bp, Zea mays
tgccatggcggctttctgcaggcagtagtgcgcttgctggtcggggtcgggcttggtgcaccagtagtcgtccccggcgccggagctggcggtcgtcgacggctcccgctgctgcgtcgtcttggctccctgctgcttcttctgctggatcctggtcctccagtagttcttgatctcgttgtcggttcggccggggaggtgcttggagatcttggaccacttgttcccccacctcgcgtggagctcccggatgaccgtgtcctcccccgccgtgatgctgccgcgccgcacccccggcctcaggtagttgagccaccgcagcctgcagctcttgccgttgcggttcagtcctgccgaaatttttttaaaaaaatatatcaatcaagctgtgcgctcatgaaagtatgcatgcccattatctaaaaaaaaaaatccaaagcatgcatgcgaaggaatggaattggtggatcgagggcgggtagcttacca

SEQ ID NO: 9956 - DNA, 1123 bp, Zea mays
tgcatgttttctgttgtgacctaagcccaacaagaagagaaatctcgggcgggtgagcagcccaacaggcaacagcagctctccaccttcctcaccctttcctcctgaatcctgatatttcctcctttccccatcccttcccctggcttcacggctcggctggctgcacgccggagccccggcgccagatctcgccaagtgccagggccgccgcaggcccctctttgcctgcgcgaggtctcagaatcccgtgggggaaaaaaagaaaagaaaagatgatgacttcctctgcctgttactacctgtgccgctccctcgtccgggctcctccgctcaagtcgaggagtgcagtgcgctttccaagcgccgccccgccaggagccagcggtgccacctccacctccaaggtaaacccacagctactacctgtgtgcttcgtaagacctatctatgcctgcacccaccagcacagggatatgtaccggcctgctcgtttcaggtgcttcaccgatctgtcggctgtgttggtctgcgaggtccttgcacgcttcgatgcaaaggaccttggaattgtatcttgcgtctccaccctcctgcataacttagccacagatcatcagggatggaagaagtgatactgcgaaaggtgggggcttccagaccttcccatcaccctgagggcttgttcggttctaccctaatccatatggattgagggggattgagattgagggggtttcaatccctagtaagtcaaaatcttttctaatctatatcaatcaccttcaatctatatggattgaaaataaccgaacaagccctgaatggactcttcttgccaggtggtggtgccctagatgggaagtcctggaaaacaatttttttggagcgggagtttaggagtaaatccttcatgggaagattcaacgtggatattctctgtggccacaacgaggatgtacgtgatgtgttccttttggtatcagcaaatctgatattcaccagcggtcgtgattctgtggttaggatgtcgaaaatggaggaagggttattgattgatacatcccgtgcacttggtggcaccatccgggtgaaaactcaggggtcccggagctcgattaga

SEQ ID NO: 9957 - DNA, 485 bp, Zea mays
tgtgtttatgttacatgttccaatcgagccccactcatacctttttcctaaaatgtttgataagggctcattggatttaccacctccttagtgtggggccttgagtaggatgattaacttccctactttattgccctagagattggtcagccagttatgctagggctccatgtttgacttttttgtttctttttttatgacaccaacagattgtatgggatgaattgagccaggggtcagtcaatgtgattcagtttttcttctgaattatttttcttttaagaaggacagaccatgtacaatggtgagaactctcactgagtctcaccaggtcatgggtttgcagccgcctctccgcattttgatggggaaggcttgcctcggtttatccctttttcccgaccctactagtgtgggagcctccagcactgtatctatcatttttatttttatttttaaacaaattgtccatatgtgtaacagca

SEQ ID NO: 9958 - DNA, 466 bp, Zea mays
tgacgcgctcattatatatccccattgttggattatgtacatgatggatgtcaataatatcatagtgggctacactattttacttgtggataaaacgttagcttctgccagctccgtaagcaagtgtggcaagcgtttgtgcgcctagtctttcattcctaataaccaccctgcttctgctcctgcccatagctattctctctcttgcttgcttgctgtgttgcctttgcctgccttggcctgagactgtaagacttcctgctgtaaggaaccaagcatcagcaagccagtcagtttccatgccctcccttttcgttcttagccatcctgatcccatgctaatatgcaatgcaacaaacagggaggacactacattttgtgccacaagctgctcattgttgtttttatttcttttttgtaaagatcgacactacatacacctcttgtacaacaacattctcagtca

SEQ ID NO: 9959 - DNA, 551 bp, Zea mays
tgtattcaagcttctgtacaatggtcaacctgcttgcttggcacaatctcctcagttgcacaagcagatggctctatgtggtggttttgaacgagtatttgaggttggccctgtgtttagagcagaaaattcaaacacacacaggcatctctgtgagtttgttggtcttgatgctgaaatggagattaaggagcattattttgaggtaagtttgtaagaagaattcaatatttaattgtctgaagcagtcattattaattacaacttatacacaggtctgtgacattatagatggcttatttgtatcaatatttaaacacttgactgaaaactgcaataaagaactcgagacgataaacaggcagtatccatttgaacctctgaaggtaagcattcttgcttgtttgtaatttgagtatttgactatgcagttctatggttctgtagcctaagagattgacagatcacttataatgttatgcagtatctagacaaaacattgaagctcacttatgaagaaggagttcaaatgttgaaggtacaaacttgca

SEQ ID NO: 9960 - DNA, 484 bp, Zea mays
tgcatcatccatggcagcagcagcaccatgcggcagtgcaacaacggtcagttgcgcgtaatgctcgtccacgtacgaatagccatgtgcatggaagaatcgatcgatgatggaggaagagaggactcactgaagcagatgtagaggacctgtggcggcagcacgacgccgcaggcgatgggcaggtacatcatgcgcacggggtccaccggcttgggcagcatcttgttcacgtccccgaggatgacggggcacaggcaccgaaggatgcggtcgtcgccttccgccgccgagctggagctgttgaggaacgccccgaggccggcgcagcactcgctctgcggcgtgggggtctccggctcgctccccgtcaggaacgtcccgcacgtcatcagccccgcgagcggggtcacgcagtcggtcggcgacgacggcgtggagccgccacccacgctgcccgccggcaggccggggaagcccggca

SEQ ID NO: 9961 - DNA, 515 bp, Zea mays
tgctgcctgctgctgtctagtccatcttcatcctccccatcgcccgactggatttctcccccgaattcgcacctccggcctcccccctcacttcgctgtgtctcatcaacgccggcatcaccgcgaggactgggccagctctccctccctttctcctccctccgccttcattgctgacggcgacgactgggcgagctctaccgccgctctgcgctaggtgcccaggtcttcctcgggcacttcaccggcgacgagcacccatcaggtgtgcccacccccttcctttctcttcctgatatgcgaaactgagcgctcaaaccctaatgtaagctagtatctggttatttgtatttggatctcatccgattacaaagtatatacatgtattatgcctactaactaaaggttcttccgcaccaaaaaaataaataaataaataaatcgggtgtacatgttccaacccctggtgtcaaacagcctacctcgcagttatggcatctgtagcgtcacaacca

SEQ ID NO: 9962 - DNA, 456 bp, Zea mays
tgctgcaacaatgtacatttcccattgagagaaggctcttgcaaattgtgtgctgagtggcttgcattgcttggctggctgcctgactactgcactgcacctataaattgacaagccctcccctctcctgctctgcaaaccatacctttcatcagcacggtatacgtacgtagacgtagccatgaatgtagagcgcgatctccacatgacccggggcgacggcgaacacagctacgcctctaactccaggcttcaggagaagtccatactgaagacgaggccggtgctgcacaaggccgtcgtggcagcggctcacgcctgcttgtcgctctcctcaggacccggcggcgctatggtcgttgctgacctcggctgctcgtcggggcccaacactctgctcgtcgtctccgaggtgatcaaagcggtggccgactgccgccgccgacacgagcagca

SEQ ID NO: 9963 - DNA, 501 bp, Zea mays
tgacagtttcattactaccaagtgaataaccaagccatccaaaagccacagtgcatggatacaaaactacaagaccagaacataagcagtaatgtgtacgctgttcatgagactgacatctaattttcgaatagcaattgcggccaaaacaatctgtttgaagtttcctttgatcaacagaaagggaaaggaaactcaaggcaagggcattcacaaaatccatgcaaaggcagcaccggaaaagtggagctgcttgatcccaaaactggatgcacatcgcagagcacatcatgcaggcatcagcacaagccaaacagagacctcatctccatccaatcttatatcctcggttgctgtctcaacaatgggacaaaaaaaaggaagaatctgacggacctccgaccactagagcagcaacataccatggtgtgttattttgcgtcccctgcacatggatagcatgaaaaagcaccccgcctctaaaaatgatttcatctctca

SEQ ID NO: 9964 - DNA, 490 bp, Zea mays
tgtgcaactgaatcgcgccaggatccaccgaagtccctcgcccacgcggccaacggacggatggggctggccgctggcgggacccactgcctagcttcacgggtgctcctcctacctgacgcgtgcgcagtggacggagagatccgtggggtgcggatcccttgcagtccggaggggaattgaccactcgttcgctgcgcataaaagaggagcgatcatggccctggaactcaccgccctagtcaaccagaagtaaggcagcgcgttcgcccatggtgtgtcgtggccattggagagagagggtgagcgcaggaaaccaacaggggagatctggagccgcactcgaggagagagaaagggggagttcgtcggatcatgtggagcgaaggtcgcggcaccagggcctgctagagaggttcgctgatgagcatagaagttcatcggggtattgggtttgtttcctatggagtccgtggttcgccgctgggca

SEQ ID NO: 9965 - DNA, 503 bp, Zea mays
tggtggcagattttgcacacgtacgaaccgatccacaccgccaccgcggacccgggccgggtccgcactgtcattttcagtcattttcagtggtcaacacgtggttttagggtctcaaggttgaactattgcaaagaaccaaagaacaattgtcattctgctcttgcacagatgcgcgaacggctccatcctccaggcacaaagtcatggccaggacccaggtacaagcattaggcaaggtaaatgaccggtcagtcagcactgaagcatacagccaaatgggagctccaggctgtacaaaatctaagcacctcaaacaatttgaagttcacctagacaccacgctaacagagcgacattattatttctaacaacccacatgaatacatgctaagtctcagggttcgctcttggcagcatggctgtctgatgcacctgcgttctgagcatgtgatgacagagaaaatcctctcatctttaggtccaccggaaatggatgcgcc

SEQ ID NO: 9966 - DNA, 480 bp, Zea mays
tgtttggtactcctacttcggtgtagtttgatctttgacgatattccgagccttagagctactaatactaaagctaaattcatgcactttaggggcatgttcgaaaactagttatgggtgaaatccggccttttggtgcttatttaagatattttgctgctgtcagattctgcttgtgaaacacatcgaggacgtactcgaccatgctttcgaaggcggatgtccacttaaatcacgctccaagttatagcatccaactcgcctttgctatggatatttgcttcggaggatcatcgtcaacagtaccacgaatgatcaacagtcagaataagagcctagctctcttgccagcacaggtcttgacacgcccattttggttaggcttcgcatctgaatgtgtatactggtcagaattcggagagcagtcagaagatctgctcgttcacctgctgggactcattgcatagtttctcgacacca

SEQ ID NO: 9967 - DNA, 448 bp, Zea mays
tgaaggtattttcagtcaagtggtggaaccaaaaggtagagaacatgaagtgggttttatttattttgatgagctcctgaaaagaggattgatccagcctgtagatacagactccaatgatcaagtgttgtcatgtatagttcatcaagtggtactggaatttattacaaagaaatcaatgcaggaaaacttcatcactgtcgtggattatcgtgaaacagggacagtgcttgatgataataaggttcatcgactgtctgccaggtttgaaggtgccaaaagtgcacagataccgcggagcttcagagtacgccaagttcggtcctttatgttttctggattcattaaatctttaccttcccttctcaagtattgccttgtccgagttctgattcttcatgtttggagtgatgatcagggcaagactgtggttctagacctttctcca

SEQ ID NO: 9968 - DNA, 468 bp, Zea mays
tgtaacttgtattttggcagtacagcctgattcatgtcaagctccatacttacttcataataacgacgaaaatatgaagcgtcccccaaaacccctggatttgtgaaattcaccattgaaaagaattcttccaaatcattctgcagcaccagaaaacattgagtacagcaaattccaagtcaattgttctaggataagcgtgcaattctattttgtggtaggtaggtggagggagaccaaaatgtacctgcattggggtaccggacaagagaatacgccgtgtacatggaagggcagccaaagcctacacattatgcattttaacgtttcagcagaacaaagccagagagggaccacaagtgtagatgaatagtgtgtgtaaatgacatcagtaaactgacggaccttatttgtcagtgtctgatcatttttcagcctgtgggcctcatcacatatgagaaggtcaca

SEQ ID NO: 9969 - DNA, 549 bp, Zea mays
tggaaagatgccatcagggaaccaaactatgacctttgtagctgtccaggtattctctcattcaaataactatgacctttgcatgccatttatttatctggcagtttgtcctgtgtttgcatttgagtacttgttggataaaatgatgtagttatccaatgatattttctttaagatgatgcaacccccccaaaaaaaaaaagaggtcttgctttcctcaaaatgacctgtttagtatcatctatcattcagcgcaggggtatgctgggaaggtaaggttgggggtactgataataaaactgtatacaagtggtcaccaagttgtatacgtttgctatttattaaatgagtatcacctatgcttgtacaatgaaaggtggtagttctaacgatgctcccacaagatgccaatggttacaggggacatgttgtgatgggtggctgctagattaatcccttaggattgctggaagaaaaaagagaaagactgtttacctagccttttcttgctgctgatttttttctgttttcatttcatttttttgtgca

SEQ ID NO: 9970 - DNA, 589 bp, Zea mays
aattcgagctcggtacccctggatattgtccagaaatggtgggtgttctccaatgacgggcagcaaacgtgcatgcaagtgttaagccttcaagggctcttcttgttatccatatgggtgatatcgtccatatcctccagtgaagcttcccctattcatgtcaggtgtgctagcagatccataaccacctagcgtaggatcatatgccccaccataggcggtgccactaaagccagaactactagggccaccaaagctctcttcagcatcaccaccaaacccaggattaccaccaggggcgccgaagctctcatcacctccaccacgtctatagccacttaagtcagcaccagcataagatccaccaaaacctcctccatataacccaaagcgaccaggataaccaaacgaagacgcggctccatatccccctcctaatcctgcatagtaacgaccatatgcaccaccaaaatcacctaccccaccatagctgctgagcctagcaccaaatcctgtatcgctcctataaggaccaaatccaccacccctgtagtttccataagcactggccattccaccatagttgtca

SEQ ID NO: 9971 - DNA, 557 bp, Zea mays
tgacatgccggtctcacatgtcagcggcgctaccggggacgaacaggaaacaactctctgcagccgagaaggcgcgcacggccggggcaccaaaacgaacaaaacaaattttcggaggaggggagtcttcagccttgtcgctcacggccgcagcggccggaggtggacgggcacgccgtgcttggggcggagggtgagcacgttcaccggcgcgtggcggtagtcatcggagatggcgatgcggaagtgggacagcagcatggcgagcacgaccttagcctcgacgagcgcgtacgcctgcccgacacagttgcgcgggcccgccgcgaacggaaggaacgccgggcgccggcccgcagcgaaccgctccggcttgaactcgtgcgcgtcggggccccagatggacacgtcgtggtggatggccagcaccgggatccacaccgacagcccgcgcggcaggtggaggccgccggttaggtggatgtcctcgaacaccatccggggcagcagcgtcgccggcgggtacagccgcagcgtctcgtggatgatcatctgca

SEQ ID NO: 9972 - DNA, 515 bp, Zea mays
tgctgcagggagcctgggaggaaaaggagcacgatcgctactgccttttgcatgcatgcgtgtagagcgagggagactactcattgctcattagtcaagcggtcaagcccaagtccttgttgactgtacctcggcttagcaaaagagagcaaggccaaacagaaaagccacgacaatgtgccttcaatccttcatcgtgccctggtttatgtcaacttctatattcgactctataatccgtacagtctatatataaaataatatttcatttatttatataatcgtgtgataatcttagccttaccaggactagaaaaaaaaagatatttttgctgagccttttttttttatgtttgtgcatatgtttcttatatcagatatcataaaataagtgattttgcaagtacctatggaagttcatgtctttgctcccgggctcgtatcgtattgtagcagctagccaaagctctgaatcattccttcctcatcatagttgaaatttggatacaaaacca

SEQ ID NO: 9973 - DNA, 519 bp, Zea mays
tggaagaagacctcctcgggcccggccgcgacgccctcgacgtcggcgcgcgccgccgcgtcggtgagcagcgcggcgtccgagcggagcaggcccctgcgcttgagcagcgcgcggtagtagcccaggtcgaacgtcaggtggctgcctgggtccatctccaccacgccgtcctccgcgtacccgccgcccgccgcccggcacttgcgcctccgcaggttggccgcgtaggtcgcgtccagggccgggtcggcctcggccgtgtcgttgccggccgcgccaacgccgccgcctgggtagccgtacaggcggtccgcgaaggaggagcagtgcgcgatgccgatcgtgtgcgcgcctgggtcgagcgatcagtggcatggcattcaactccacgtgtcagaaaacagttggcggtggacgacgactgcatgcgcgtgcaaagactagagatagagaacggcctctgcacttgcgtggaagatttattgaacacttgtttctatgcctttttttttggca

SEQ ID NO: 9974 - DNA, 472 bp, Zea mays
tggtttttggtgagatcatccactgttttcattgctgatgaaataatttcttgtgagtgcttccctcacttagtctatccttaatccttttggtattcagaatgcgtaaaattattgcgttttaaatttcatgattcctggtgaactctgacttccagcaaataaacttctgtgttgatacgtggaaatggtttctgtccttggattacttatataagatgtctagattaacatagtctgttagttagctgaggctcctttgaaatacaaaattttacttgcaacttgaattgttttgtagaggtgcttgcatcctaaatgtcctatggtcttgcattagctgaatgtcaaatttgttttgagagcaccctttcatcttgttataatatcaaaatttaaatttggaccacactatgttaaattctatcaagttaatttagctctacttgaccttttgtaagaacttatagca

SEQ ID NO: 9975 - DNA, 545 bp, Zea mays
tgatcatattgcccgtgcagtccatccatcgatacgtctgtccatcacagagttgagattttctgttcaccgccgccaatcgccgccacatgaagttctcctccctcgccgccgccacaataggttcgtctccctctccctccccgccactgcaaagttcttgttggtctgcttcttcatggacgtgttttcgtgctcgctatacaccatgcgtctcctatacgaaactttgctgccatcacgtctccccatgtgaaactctgccgaccatacatgccgcaacgtgtttcagtattaacgtgaggaggcagaggcagaggcagcaagctatggcttggtatcaagaaagataaacactcattgtctggatcagggaaaaatgaattcttatggtggatatatgcatcaagaaactgataactaatactccctccgtttctttttatttgtcgctggatagtgcaattttacactatccagcgacaaataaaaaaaaacggagggagtacatgtgcatcaacacttaataccatctgttatggtca

SEQ ID NO: 9976 - DNA, 498 bp, Zea mays
gtgactgcgtcgtccgtcgcggggatgacgcgtggggcctgagccacggcggcggcggcggatgccctggggttgggctccggagggatgggccccactcctaagcggggaatcgctagctcgcagatcggaagtcgaaagatgcggcggcggcgcaaggacgggtgacacctagtggcggcgcgtgcggtggcgccagcgtagggggggggatatgttcggctggctgtccggtaggtcccgctggccggagcgtgcggagatcggggagggcaagcggtgtggtggtggagcaggcgaggagagaaaggaggaaggcgacaggtgggtgcggggattttaatgaccgggtcgccctcactcccaggtggcgccgcggggcccgggagcagaatctttcggcgcggcatggacccaccggtcagctacatgaggtcgtcgcaaggctcgtgagtggacgggcattaatgagggggcgcgagcgcgatgatggccgca

SEQ ID NO: 9977 - DNA, 462 bp, Zea mays
tgttcctcgccgtcacctacgccggagccatcatcgcccctctcaactaccgctgggtgcgtgcgtgcgtgctcctccacttcatctccttttctcggttcttacagcacacagcactcactccggcaaagagtgcaagtaagtttcgtcgtcgtctccccctgttgtgaagcagagcttcgaggaggcggcgcaggcggtggagctcgtgcggccgacggcgttcgccttcgacggcgcgttcagctcctgggcgcttcggctgatggagggtgacaggttcccatccatcggcctctacctcctcctgggcgatccttgcaggaccggccgcgctgctgcaggttgtggtgaggttcttgcttgcgttgcatgcgtgggcattacaagagactctctgcacgcacctagcacttgcaatttacacacgcttgctattttcttggacacatgttgggttca

SEQ ID NO: 9978 - DNA, 481 bp, Zea mays
gatcaccgaggtcctgccatggaggatatgtcgatgctgctgatctttggaataactcattcagtttcacttcctctctttgctgctatcttggcagaaggagccaatctcaagcttataagcttgtcactcttgatgaatcaagtcagatttaatttgcaaggtcttttgctaactctttctaggtccagttgaacccattcaagtcaattttcttgcagttctgtggcccatcagtggtatcattgatgttcagatccagttttgctgccttccgcgtcatactaaaacttcctctctcacgcctgtctagttggcctggaggcgtcatgcttagcttgtcaagaaacaaatcctctcttcctctttctttctcttgtatatcaaaggtcatgcctcctatctcctttcctctgtgagcggaaagactgattgacaggatatcttgatctttctgtgagccgtcacaggcagttaagca

SEQ ID NO: 9979 - DNA, 462 bp, Zea mays
tgctctggttttggttctcttccagccagccaccgtagagcgcgcagcaaagctggcgtcagtcagtctgacagctcagctcctcccgacctccctatatctctgctcccccaaaccctaatccctggcataacacaacaatctctctcccctcactccctctctgcagcgcgcagctttcaaagcgttgggagagatggcagaggagacgcaaccagaggccgccgcagccgccgccgcgcccgccgcggccgaggtagtcgtgaccgaagctgcgccggcggaggcggaggtgcctgcggcggcggaagctgaagccgaggccaaggatgagaagaaaggtgacgaggcggagctcaccgccgatgacgcgggggtggggaccggctcgttcaaggaggaaagcaacctggtggaagacctgcccgacccggagaagaaggcgctcgacgagttcaagca

SEQ ID NO: 9980 - DNA, 485 bp, Zea mays
tgcattggttttggttctcttcaagccagccaccgcaaagcgcgcagcaaagctggcctcactcatacagctcaggtcctcccaagctcctctctatatctctctcctcccatcccccaaaccctaatccccggcgtaacagtataacacaactgtctctctcctccctccccctcactctttccctctctctctctgaagcgcgcagctttcaaagcgttgggagagatggcagaggagacgcagccagaggccgccgccgccgcagccgaggccgaggtggtcgtgaccgagccggcgccggcggaggcggaggtgcctgcggcagcagaagccgaagccgtgaccgaaacggagaagaaagccgatgaggcggcggtcaccgccgatgacgcgggaaaggggaccggctcgttcaaggaggagagcaacctggtggaggacctgcccgacccggagaagaaggtgctcgacgagttcaagca

SEQ ID NO: 9981 - DNA, 489 bp, Zea mays
tgctccatttcatctattgcccctccacctaggcatattcttgtcaacctcacaactgtggctttgttcaactcccaattgccatcccttgcacgttttaaaaagtctcctactctgctggcctcctcctttctagagagaatctcaagactggcctccaaaatagtagagtttggcttaatctccaaggcaatcatttcctcaaacaccgttttggcatcgtctagcatgttcaaccgaacaaacccagtgatcaaagattcaaaagcttgaatacttggcgtaaacccggcgttctttgcagctacataccagctcatcatagcatggccacttccaagcagtgaaaatgcacagatgaatgcatcatatgtagcggaattgggactgcaagcgtccatgctttccatagtctcgtataaggtcattgcagaaaggaggtctccggctgacaagaaagcatcgacaagggcattgcaaatgttagtg

SEQ ID NO: 9982 - DNA, 762 bp, Zea mays
tgccgtacccgcggcggatgcgaacgggccggcccaagaccatcacaggcaagcctccgctttcccgtttccctgttcagttctttgtcaccaccgccatctgtcctataaattccgcgacagcaacagtggcgaccgagcatggcggagagggcgccgtcgccgtcgcgcgtagctttcgtatcggaaccacccgatcgcgggcgacgttgaccgaggctaacatttcctcgtggtggcgcttgcagacgaccgcgcggagagccgggtggagtacccggagcccatctacgtgtcccgggacgaggagttcgaggacgggaagaacgagatgctgtcggagggcgcgctcaaggcgctgctccataacttcatgccgctgctggtgagctccgtgtcgcctgacatccgcgacttcgccggcttccacgacgtggacaacctcttcaaggagggcctccgcctgaagcaggccctgcaggacctgcttatgagagatatgcagcacccacacgctttcctactagagaatttccctctgctttcagtcctggtgtagatcatatgcctcatcattcctatcgtgaccatgtgcctactgatagctactctagtaggggtacacagcaattaggcatcacaagaggtggaaattcagatgcttatgactataccgaggtacatccttgacgtgagcttccctcttttgcaaatggccatcacctaaatttttcattagaagcttgagactttacacatgcc

SEQ ID NO: 9983 - DNA, 517 bp, Zea mays
ctgatcaaccacattatcaaccttgtcatcatcagatgtgatgtcaattatctcctcattggtaccaattgtggtgaaaaacagccatggaattggacataaatcagcacttccacacccaaactcaacctgcatatgaggtggtggccaaggctgtcgatatggcactgcatcccagctaaaacaactttgtatgagtttgaagcaattcgtcaaacacctgttgggcgaggtggcgagaacctcctcctcctctgcgctcctggtgttggacatggggatcccgctgatactggtggagtcctcctggaacctgttgtggctgtagaaggcgatgtcgagcaggaaccatgtggcgtcgtggccgacgaggtgctggaacaagagcttgcggattagcagccccgtgctcttcttgtactgacggatctcgcacagcgcggcggtgcccgggcggagctggtgcgccttcttcacgccgcgcgtcctcgtctccgacttgcgcgcccccttcgtt

SEQ ID NO: 9984 - DNA, 496 bp, Zea mays
tgctggacggcggcggctacctcatcttggtcctcgtcgttctcttcttcctcaacgggaaggacaaagcggcggcggatttggggtcttgtctcccaaattcaattcctccccgaatctaaccgccgacgtcgctaccacggtaagtctcctctttttcgccgctgtttcacgcccattcctgcgatttagggttcctgattgcgcatttccccaccgcatttgattgaatatacaagcttgccgttttctctgcaggatcaccgtggaaccctgagtctgtcgcgggttttggcatgctatagccgccagcctgcagcagcgatcgtctcggtcttgggcccccgggctagccatgtcgtggggacggttcagcttcactcctcagcaggggcccacgctgacgcggcgaacgcgggtgttccctgcgcacaagcccgcacctcgcaacgtggtggtcatcgatgaggacgatgatggtgatgttatcattatg

SEQ ID NO: 9985 - DNA, 736 bp, Zea mays
gctagacttgcagcctgcaggtcgatctaagagacccctgttcctgcccaccggtgcatcctggccgcacggtccgtggtgttcagggcggagctcttcggcgccatgagggagaaggacgcgcagcgcatcgaggtccaagacatggagccttcaatgttcgaggcgctcctgcacttcgtctacgcggctgctgaaaccccacatcctgatgccaccactcaccggatccccgccgtatatgaggtcgtagcactccggcgagaggcagcgcagcacgcagttctccttctccgtcggcgagtacctgcacacccatccccacagcccgctacggcacggccgacagaaacaaaccaccgtcagaactcagaaacatcgcgtcagatgcgttccactgaatagtagagaacacatcatactaacacgtacttctcgacgtcggtgtagcaggcctccttcttctgccggatctcgttgtcctgcgccacggagttcggtaagcgcgatgggatggatagagactagaagaggcgggcggaggagagatggcagggtcgggtcaggcggggagacgtacggagatggggcggcgagaggacttggcggcggcggagacgacgaggagggcaagggtgagtactagaagatagcaggcggacgggaatcgccgtggattccggtgggacggatgcgacggccgccgggaagacatggcaccgtgtggatcccgtca

SEQ ID NO: 9986 - DNA, 559 bp, Zea mays
tgcacaaatttcagtttcagggaaattgcgaaacaagttctgaacttatttctattctgtgttctatcttacgtatacattgttaccgtgaccacgacaacagatacatgatgcagagggaggtattctcttcgtggatgaagcttacaggttgataccaatgcaaaaatccgatgacaaggattatggtttagaagccttggaggagataatgtctgtaatggacagtggcaagatagttgtcgtatttgctgggtactgtgagccaatgaagcgagtcatcgcctcgaatgatggcttctgcaggcgggtcacgaaattcttctattttgatgatttcagtacgacagaactagcagagatcctacatatgaagatgaagagtccaagtgactgtagcttgctttacgggtttaagctgcacccaagctgcagcattgaagccattggagagctgattgccagggagatcactgaagagcagaggaagcagatgaatggaggccttgtagacacgctgctcatcaatgcccgcgagaacctggattcgcggcttgat

SEQ ID NO: 9987 - DNA, 552 bp, Zea mays
attcgagctcggtacccctgctgtcttctggttgagctctcagtaaccagcagtgaactagatttttggttgttgctgctatcatcattccttccatatgatctcctgtcacaagaaacaaggggttgagaagtaggcacccttggactcaattttccatattgccctttggcggttctattaatcgttgaagctttccttctatcagtgctattgcttgtttgtggctgtgggagatcagatgaacctcctaatgggaagacagaagaatccactttgctgtaaaggtttgcagattttgaaggtttcattatcacaataggcgatttgaaagagccttcagcgttgctctcttcaggcatccacatgttgttggtgttacggttcagtctcatgttcgcactggccatctcttggtcatcatggtttccattatatagctttggcacaaatgtttcctcccgtttcttattttctaatagtccttttgcagaatccaaaatctgtttaagtgctctaaggtctttgtttggttgctgaaaatcaagatcc

SEQ ID NO: 9988 - DNA, 482 bp, Zea mays
tgctcaacctgcacggggacaagaagaagaagaagatgcaggggaaaaggcgccgagcccatctcgtcgcgctgagctccaagaacaacatctggggcccctgcggaagaagattctcaagacggtggatgagctcaaaggcgacctctcccaacttttcagcaagtcccctgagctcaacgcgccacgcgcgcgcccacctcgtcttcccaagcaagaaggctacgtgtcccgcgcggcggcgggggcggcctcggtcctccctgccagagcgcgtcacgccgccgctgctaccgacggttaccgtggcagcgcagctcgtgcgctgaagccccgtcaagccgctgctcctcctccacgtggcttgccgtcccggcgctaccgccagtgcagagcgcacccgtgctgccatgacgtggagcccaggtcgtgccgccacgggcacggctgctgccgccaccacggcaagccggagtgcagca

SEQ ID NO: 9989 - DNA, 498 bp, Zea mays
tgttgttcttttagcccgtgataaggggggcgtgctcatgcatcacggtatatctggtgcgatgtcatacaaaattgatttttttatattcctttttgttgtggatgttacaggtcgaggtggaggcgcttgtgatccaggggcccaagctgccgaccatcctcagccaggtgaagaagctggaggcgtccgtgctggtgctgagccaacgcagcccctcgcctttctgctggtaagcacagcagcacacacgcatgcggcatgcatgcagcatgtcatgtgcacgcaccgccttcacatccgtgtccgtgtgtgtgtgtgatgcgtcgctcgtctcacggattgtgggctgtgcagagcgaaagagggagggatagaatctcgcggagctgggcacggcctatcggctggctatcgcactgctcttcttgcccattattactcttcagaattcagaaacagatgcctgaaactcccagagagcatctacatttggca

SEQ ID NO: 9990 - DNA, 570 bp, Zea mays
tgctgctgctgctgctgcgggcgctcctcctcgccatcgccggcgtcttgacggtgatccatcgcaatcgcaatgcgcatgcatgcgcgcgtcaccctgcttcctatactactcgttgtcgtcgtcctatacttatagtatgtaggctaggatctgagaagcatacagaaggggcacatgcaggacacgcacgttgacttgggcatactgatgcaagcatactgatgcaagctgcacgatgggttgactccttcatttctctccttttgtctgcacgtggcaaactggcaatggcatcgacgtgcagatacagttcatatacgaagataaaatactgtaaaagctgcagcaatcctcggcgaaatggccagttgcaagccacatacagcttgcggagtgcctctgatctgatcgtgtttcaggggctgcggttcccaacgactggctgttgatcgaggaggcagcgaacagttgaaacatgtgcaggaaatttcagcaggcagacgagaagaacacacggattgcaaagcatctgatgtaaacaggggtaccgagctcgtattagtgtga

SEQ ID NO: 9991 - DNA, 492 bp, Zea mays
tgactttggtcgcttcccgccacgtcgtgtacggctctaccggcgccatgcgccaacgctactgtatacggcgctggatacgcgggtacaaggaatcattatttaacaccgcggattagctcagtgcactcacgactcacgacgcaagctaagtggttgccagtcatgggcatggccgacgccaacaggcgcatcaatttcgccgcgccgctcctctccgtccggcgccacggtggtgccgagaccgcgcccacggggacggggttgccagcctacaagcaggcgggagccgccacgtcgtcggagcccccgggccgcaccactaccagcgccgtggccgtggccgtgccattcgggtgggagcgccgacccggtcaccccaagagcgtccgcacccgccgccagccgccgccgccgcccctcacgacgatcgtcgacgagccctctcccgcgacgcgccgctcggacgacacgctctcccgcgacgacgct

SEQ ID NO: 9992 - DNA, 515 bp, Zea mays
tgcacgatttggtcacagagctggaacattaccaaaaaggaatgactcggcggccatcactgattgtggcaaacaagatagacgaagagggagctgaagagatgtacgaggagctgaagaggagagtgcagggtgttccaatatttccagtttgcgccatcttgcaggagggggtgccagatctgagagtgggtctaaggaaccttatggatgactcagatccgcagggcgttgattttgaggaaaacgactgttaaatgaggttcgatctttttttctgtcctcatgacactgacccatatgagtgtgttgtggatatttcttctgagaatcagaggcttatatggatagcgattagatctgcaaatgttgatgactctgtggctattcttcttcttcttattgtgttaattacaacgattgagcatttgcaatctttttagtatcctacttgttaacgagcagaaatatggagtagctgtaaggtttgtttcatgttgaacagggtagtagca

SEQ ID NO: 9993 - DNA, 445 bp, Zea mays
tgcacgatttggtcgcagagctggagcattaccaagaaggaatgactcggcggccatcactgattgtcgcaaacaagatagacgaagagggagctgaagagatgtgccaggagctgaagaggagagtgcagggagttccaatatttccagtttgcgccatcttgcaagagggggtgccagatctgagagtgggtctaaggaaccttatggatgactcagatccacagggcaaaaattttgagaaaaatgactgttgaatgagattctattttttttctttctcatgacactaacacatatgagtgtgcggggattagatctgcaaatattgatgactctggctattcctttcttgttgtgttgatgacaataattgaacatttgtaatcttatcattcttgtgaaagagcagaaatactatagggtttgtttcagggcagcagca

SEQ ID NO: 9994 - DNA, 472 bp, Zea mays
tgcaggtcgatgggcgggtggtcagattcagtagcggcgcacgaggccggtgcagcggtccttgatccagcggaagcccttgcggagcgacgccttgaccctggcctccacggcgtaggccttgtacccggccaccctccgccgccgcttcgcctcggggtcgcccgacgaccaccacgacgccgcgcgcccctcgctgccgcccccgtcgtgcgacgccgccggctgcgcaccgccccggaactcctcctgcaggcccctcatcgcgctcttgcaggctctggacggacgtgggaggccccgtggcgcccgcacgtatatctagcggcgagacgtgaaaaggctgctttcgtcgctggtgcttggcatggcattggcattggcatgccgcttcttctggagaaatttaaaatatcgagcaggtgagggcggcacgctgcgctgacgctgaacgatgtctccgatcccagca

SEQ ID NO: 9995 - DNA, 481 bp, Zea mays
tgcacaagtttgagaatatacgggtttcacataatgtactcaggataggaagtttgtaaacacttgattggattcctttgtccatttcaggtacttaaaccagccagcattaaataagcactacgtttgtccagaatctagaaagggagggaactggaatttagagaggagaaaggcaaatagatggaaacacaacctcaaacccatgaaccaccattgtaaaacccagttaatcgtccttctattcctaaatacctgccatgccaggacactgacctcacctatcacccaaacacacaagcaactaactaatcctcaagctcctatgaactacagaaaacaagggcaagaaacaagctcaatgggatctcaggatttcctcaaacaacccccagcctcaggttcccgccccataccactgtcaatggccgagctaaccaaaaaaaaaatttaacagccatttgggcttgccgacttctca

SEQ ID NO: 9996 - DNA, 527 bp, Zea mays
tgtaaaataaagtaatttctgtggttgtaaattgtactaccttccttctcgattatctgtcgcccgcccgctagttcatatttgtcaatgctgcctttggcttgggcggagggaggctccccgcttcctggtgtctgcagatgtaatcagggtattgcctgatgctctctggtatccgccgatgtgatcatgagcttatcaatcaccttttattttctgattctgaaaacttgagacttgaagccgatatattattcagtagtcgttttgtctgtcgaatgtttatcagtccctgcaaggatcacaccacgctgcgctctttgactgttttggcttcggcggagttgcggttcggttagtcagtttgcatagttcctcgttgcagatgatcgtagtttacaaaattctggtcgtgttcgtgttagttgttgtgccgctcttgctcggttgatggcaagatggcagctatatgtggaactgaactgccctgtcaaatcaaagccaaactgaatcaccaccaacaagca

SEQ ID NO: 9997 - DNA, 575 bp, Zea mays
tggtgatgaacggacgacggagaggccgggcagcagagcagtggtggtgtgcacataaaggtcgtcggctaggtatgtacgtaggagtaggacgtactactccgtttgcttgagatgtgcgtgtacgtgctctgaatctctgatgctcggcggcgaagacgacgacgtgccctcctgtgtggggacgagccctgagatcgcgggtgcggcgtcatgttgttcacctaaactacaatacaaacatggctaacaacaaaaaagaactaattaagcttcgatagggttcatgaagttccccccggcctaaacttcacaattaggacggccacaatcaaagttttctagctttgcatcatgtcttgaacaatgattgctcctcatcctcgatcctcattatgcaccatggaccactatctaatccagtccgtggccttgtaggttacgacgccgatttcaggatccagatgtgattttcattagtctcacaaaggatgcactacctccgttcttcatttttgaactgaattgtgacaaataaaaaaaataaagggataggatgtaaatctaaaatttca

SEQ ID NO: 9998 - DNA, 515 bp, Zea mays
ttggggcttcatggattcagtttgatgagcccactcttgtcctcgaccttgattctgacaaattggctgcattctctgctgcatacgcagaacttgaatctgtactttctggattgaatgtgcttgttgagacttactttgctgatgttcctgctgagtcctacaagtatgttatttatgttgctagctcacccttttctcagccattgctcctcctagacccttttgtgatgacatcatacttgctgttcttttgaatgcaggaccctaacatctctgagcagtgtgactgcctatggttttgatcttgtccgtggaacccaaactcttgggcttgtcacgagtgctggtttccctgctggaaagtacctctttgctggtgttgtggatggacgcaacatctgggctgatgatcttgctacatctctcagcactctccagtctcttgaggctgttgttgggaagggtaatcatgcttgcacttattgtctgccataaaattggatttagttaca

SEQ ID NO: 9999 - DNA, 562 bp, Zea mays
tgtttttggactggcaactcaactcatagattttgggtatgcatttcgcttgcaatggcctctgttggaaaatttagtgataaaatttaaaaaatctgtctgttcttacttctaattttctcctctgtcctccccacgctgaatccagatcattgcagtggttggttcttcctggtttctttatctttgttatttcttgggctgtcctctttctgcaattttggaaacggaagaattcagcacttcttgcaaggttatacatgattcatattgatcttccattaactcatattgatctgtaaatatcaagctaattttctcacaactgtttccttacctctttgacgcccttcaacagatggggtattcattgttcactatctgaatacaaaaacctggacaacgtcagcttcttgagtgattctcttactgttgaggaaaaggagtttggtgttgtgtctgtggttgtggagaaaagaaagtttcaaaggaacgaatggttcggtgtcctccttagaataaggaacaatgctatcattgtgctggctatcatttgtcttca

SEQ ID NO: 10000 - DNA, 568 bp, Zea mays
tgcaggctatttatggtaaaaaaaatctagcatatcatgtgctaaagtccactgttaaaaatgtaggaacattgaataagaagcaactttgtacaagtcatgtctgttactgatttcctacttggaagacaacattttttttaccaaatcagcaggacgaatttcgatctgtggggacaatcattggcaatttcagttttgcttcattgaattgttagagtattcctctatcataattggaagaaaaagaaataaagcaaaagttttaagcttctagaaggaaggatgatatttagtcattatataaggcaaacacaatcatgttccttatagcttctataagcccttttcttttcttgttgaaggctgctgcctttcgagcattgcttgtagtctgagaaattccttaacagtatattataatgcagaacatcgcaatatttgttgacttttactatgtaatgtatgtcagagaaactttgaggcaactctggcgtcagaagcacttctaaatgaagaggcggtagtagcagcggcagccgcagaggcagttgctcttgccagagca

SEQ ID NO: 10001 - DNA, 477 bp, Zea mays
tgctccacttcggcctcgctgagcttggtgccctgcttggccagccctcgccgcagctcgtccacggtgatggtgccgctgttgtcggagtccatgcccttgaacatctccttcaggcccctgatctcctcctctgacaggcacccggcaatgaccttggcaggggattcagtgattcggatttcagaataacggtgggtggcctgtcgtcaggcaggtccttgtggaatcagaatcaaataattaatgcacgtacgtaccctcagcgcggccttcttgaactggttcattgccgtgaactgcttgagcctgttcatgacagcgttgtccagtggcgtgtcaggcgcttcaccgtcttccttgatccaaggatggtctgacacatttcaaccaagtggtttaggaactcagcgattttaaaactggatttttctttttttggtttttagctcaggttttatcagttgcaaagagtca

SEQ ID NO: 10002 - DNA, 642 bp, Zea mays
tgctggagtaatccagcagcacggagtcaaggaggaactcgtcgtcgtcgccgccgccgccggcctcgacggagctgacgttgggcgttccggcggcggacgagtattgctgctcctctcctcctcctcctccgccgcccttcttggcggcgctggcatcatgtcggccccctttgtggtgcaccttgcacacgacccattcatcctgaacgtacacaatatataaaataaagccggaacaaaaaaaaaaaaagacacggttttagttttcaacacgatcgaccaagtaattaagcaagaggaatcgtcgtgtttgttaccttggggttgaagcgtagtagtaggtcgtcgttggtggtgcggtgcctggagtacttgcccttgccctcgatgaggcggaactcgtgcatcacccagttggtcttggtgccccttggagccctgcccgtgtagaacaccagcgtcttcttcatccccaccagtcctctaaatcactttgtcctctattctggtcatatgtatgtagtgatttctcaggtcttgtccatatattcaaaccaatatagagatcatattatatccatttgcattgtctcattggttatttaacctcgtgttgagcctttgttcactgatcattac

SEQ ID NO: 10003 - DNA, 543 bp, Zea mays
tgttccaaggaaatttaaaaacagcataactgttcaaaatgctctcatagacagaaagtggctgactggtatcaaagggacattgacagtaggggtactggctgattttcttgatgtatgggatgccctactgacaatcaatctacagccacggagggaggacatgcatatcttcagatttgcttctaatggaaaatactctgctaaagcagcatatgacggtctcttcattggatcaactcaatctgagcattgggagaggaaatggcagacttggtcgtctcccaaatgcaagttttttctttggccggcagatttgcggaggtgcgggacagaagataggttgtccaaacatgggctcagtcacccggataggtgcccactttgtgatcaagagcctgagactattgatcatcttcttgtgggatgtgtctttgctaggactttctgattcaggctgttgggacaggtcaatcttcaggggcttgcacctcaaatgggagaagagaacaccatgcaatggtggaaaagatgtagtgagca

SEQ ID NO: 10004 - DNA, 452 bp, Zea mays
tgtccaagccgctggacttcatcctgagatacttgcagctcgtgacgatgatggtccaggtccgacatagtgaagcggtggctcctttccaaaatagtcaaggagttgctagcgtcacgatataacctattaagattatcacgagaggctacaagtgctcgtttctcctcctacgaacaagaatcaacattcagcacctagtcaacaataagcatggcaaagtcaaccaagggagtttacctcatgtgccatcctttccgagtcaagctgagcactgagggaagagttcaaagagctcgcgccatctaaagaagcagaaactcgggccaagtcagtttgaccttgagaatacttctctaaaaggtcagagcaccattgggttaagtcggctggacttcgaagatatttctcctcaagttcagagcaccgccgggccatatcctacaatgcaa

SEQ ID NO: 10005 - DNA, 506 bp, Zea mays
aaattttcagctctgatcaagctaaaccgtgagcaacgtttgccctccaagcaacaatttcttgtaaagtaataaagattattagaggggggtattaaccaaacataatattggctactactagcctacagaaaacattaccaacgtcagaaaaaagaatgtgctccaagacaccgaaatgtcaagatgaaacctgaagggctacagcataatcaatttgtcgaaacgaacagcacaggaagcatttacaccatgctctacacatctgtgaaacagatatttcatgtaaccaaacacaggcaaaactgttccctcaatcagcaggttcctgcctccacctgcggcttttatttcacactttatttatgggctgaatcgacaaagagacccctagatccatcacaaatgtcactacattgagaaccaggtcgctagccctgggaacatggagcctgccactgccattgtgggtcaaacggtgtgtgatcttgcctcagttatgcgca

SEQ ID NO: 10006 - DNA, 548 bp, Zea mays
tgctacattgattttcgttggttcaccattgctcgtgataattacaaatgctacttaaatttgctgagtgtttttaatagaacccctattattagaagcccatatctttccacttctccactggggctatttttattttgttttgacttctgacaggtgttccatacttgatacttttacaaatagacaaagttgatcccattccaaatatgtttttaacaagtcttgtgttttacacccaaaaagtattacttctcctaatgtttgtaccatactgtgcatgactgcatgctgtctttgattttttacggcataccctccatgcatatccttcaatacacatcttgcgttgcatgctctgcagggttggttggatcagcaattttttactgattgttggggccattttagctgttgtgactttgccctttgtgagctaaatattgcaaatgggataaacaaacagaaaaacaaagagctgcaatggatcagtcatgcttctatatgctcgtgattgcctcattttctagggtttaaattgtcaagca

SEQ ID NO: 10007 - DNA, 959 bp, Zea mays
tgcctgcagattgtagctgcagattcattgcccagctccggtggcagattagccacccttctgcttcttcttggattgaagtcattgggcagggtcttcctcttctttcgcttggtaatcggagggggggggggggcagccaacagccttgtagctggcttggtaacaatctgcatgaattcttgtaacttttcagtcctctcaacatctgtcatctgggccaccgctgcctggaattcttttcttcgcgagtagactttgaaacagggatgctttactttgaatctgctgtcagagtgttcttgaaggtgggcaggggtgccacctccgctaaaattggtaacgtcctgcggctcaacagacaaaggcttgtcaacagggtgaggggtgccctgggcaggcacagtgtctggaaccacagcagcgcgaagaccactttcttctaaagtaagtagcggccagttgacggctggaataatagaatcagcatgcacatcatcatcagcattgggcaccacaaaacggtgtgattggttgcctgcacttacttatccagactctgtagatgcattgaccaaagtatagcttatgtttgcttacctgtgcacgcaaggccaagccctgcacccacagctgcagcggaggcaaaaattagtatcccggttgcatgcgtagatacgcaacgagcgtccgcttccaacgagccaagatcgtatgaggatggccacactcctccacccaaccaatcacaccgaaagtgttttcctcatgaagccattggttaggggagggcgccggccgcactgggcaggtggaaggtaggcgcaacggcatgacgatgtcctcatcgtcggttgtgggtgtcgggcgaggcgggcagtgttggggcggacggtctacatccagctttgagattagggaaatctacactatcatccagctctattctctagcgggat

SEQ ID NO: 10008 - DNA, 573 bp, Zea mays
tgccggtgctgggaaacagaagcgttgagagggttttgagggggcggcggctgtgccttttactctactgtagacgggccaaaaatagaagcccacaaataaaaccctagcccagtaaaacctggtcagtttctcgcctaatcggatgactaattgctctgggtcgatgattagttggacgccaggacgacgaggacacctggtcgggtcaccgatcctgatcgtgcccttccaggcgacctagacgactaatcgcgattagttggatgacttgaaaacaatgtcaactacgacgttgacacatctgtagcaacagcatgacacttttccctttatccgtggtttgttttcaaactgctatactacacaggtttgtgtttaggatgctccctacatatgcataatcattttttagtttgtgaaaatgtggtgagtcaataacttccaagttagttgagagtcatgagaattttttttttctgaacaattgctgtcttttcttgttttagtgtaatataagatgttctcagttatcattttttggacatgaaagcaggggtaccgagctcgaaa

SEQ ID NO: 10009 - DNA, 460 bp, Zea mays
tgagaagctgtgtcgcctgccaaccctatcactggatgatgaggccctgctactagtgctaacacacatcctgctactcaaccgtcgcaatttggtgcggtcctctttcagagttgccgagggagaatagctgttgattgatctcctccccatcatctcttcgtcaactttctcatgtcctggaacttcttcctcactgaccaccaactccaccatgtccggcccttggttttccatctctgtaacttctcccaaaggaacctccaactcggcatctttccgaacaatttgtgcttcctccacccctactctgcatgatgcaccctccttttcttccactagatctccacatttagaactctcttcagcttctgccttttcttgatttatctcccctgcttcagcgccatcattttcatcagaaccacactcttcacatttcaagtctttgacagaaaca

SEQ ID NO: 10010 - DNA, 471 bp, Zea mays
tggaaaggatccagtgacccatttctttttttacccatgattcgaggcccttccccggcactgtcaaccaaaaaagcgtggacgtgcagaaaaaggttcgcggattcctttcgggagatcatcactaatcagagaaccgaaataaaaaaaaaccccgaagcagcgcgtgcgcgcgtggctttactcgcaaaggtaccttttgtactctttatccgagataacagtagtttgtgtagccactgccactaaaaaagaagcattcgctctcctcttccacgttagctagcgggactgtagtagtgttagtccagtgctgctggtccgggtcctatgattcgatgttgctgatgaactgtagagcgtgtgacgcccagtactcataccaccatgattcgaggcgagacggcgagggaggtgcgcataaaaaacccttccccttttccccattgcattgcaagtcccagacgtcaa

SEQ ID NO: 10011 - DNA, 542 bp, Zea mays
aattcgagctcggtacccctgagaggtttcgagtttgctaaagcggttactcttgttgctgagccgttcacattggataatggccttctcaccccaacattcaaggtaaagctcatttgctctgttagaggcgaccccgataccaaatcactgacctgctgacactccacctcaacgcttctgtacctgtaggtcaagaggccgcaagccaaagcatactttgcaaaagagatctcagacatgtatgcacggttgctagagacagagttagctaggtcgaagttgtaacttgtgcggtatcagtatcaggagaaaggtcatcaatacagccgtacaggagattggattctgcaattgtttattccacctcacgaaataagtagtaaaatctttttactgatacgggaaataacggatcatgccatgctccggagtcgatagtcgtttttttcaccagacggaggcagtgcttggcgcatgctgaatatatggttctagttataaagaaatgtttttacagagtgtatattgggtctgaacca

SEQ ID NO: 10012 - DNA, 462 bp, Zea mays
tgctgccacaagggcacctcctgttcaacagactcagacaaatcaaagtgtgccacgccaggctgctacaccaaaggaggaactgccacctccacctccacctccccttgctaagctccctatggctgacctgacgcctctaggaagagagaggcttccacccactccaaataagccggagcctcctgtggtgacacttgacgatctctttaagaagacacagtcctctccgaggatctattatcttcctttatcagaagaggaggtggcagccaagctcgccgcacaggacaaaggaaaaaagggataggaggtgttagcttccattttcggctagcttggagtttgttgcggtatgcttaagttctgttgaaatgtgctttactagtccttttttgtccaaataattaatggatacgaatctgccctctttcaggaacatggcgtgcggtggtcacagca

SEQ ID NO: 10013 - DNA, 1943 bp, Zea mays
tgtagtataaattggtaacctggaatagttcttagtcttgttccaggctatccgaacggggcctaattaatgcgtgtcggccatttcacttttgttcatcgttgcgtgcgcactgatttcttgttgctgtaataattggccgctcagcgctgcgggtgaacgggttcccttgcaagcgtgaggcgaacgtgacggcggacgacttcttcttcggcgggctcgccgcggccgccgacgtgtactcgggcaacccgatggggtcggcggcgacggcggcggacgtgtcggtgctcccgggtctcaacaccctgggcgtgtccatggcgcgcacggacttcgcgccgtcgggcggcgtcagcccgccgcacgtgcacccgcgcgccacggagatcctcttcgtcgtggagggcaccctcgaggtgggcttcgtcacctcggcaaaccgcctcttcagccgcgccgtcggcaagggagaggtgttcgtgttcccccgcggcctcgtgcacttccagcgcatcgtcggggcggcgcccgccgtggcgatctcggctttcaacgcccaggggtaccgagctctgatgaatcccctaatgattttggtaaaaatcattaagttaaggtggatacacatcttgtcatatgatcaaatggtttcgcgaaaaatcaataatcagacaacaagatgtgcgaactcgatattttacacgactctctttaccaattctgccccgaattacacttaaaacgactcaacagcttaacgttggcttgccacgcattacttgactgtaaaactctcactcttaccgaacttggccgcaacctgccaaccaaagcgagaacaaaacataacatcaaacgaatcgaccgattgttaggtaatcgtcacctccacaaagagcgactcgctgtataccgttggcatgctagctttatctgttcgggcaatacgatgcccattgtacttgttgactggtctgatattcgtgagcaaaaacgacttatggtattgcgagcttcagtcgcactacacggtcgttctgttactctttatgagaaagcgttcccgctttcagagcaatgttcaaagaaagctcatgaccaatttctagccgaccttgcgagcattctaccgagtaacaccacaccgctcattgtcagtgatgctggctttaaagtgccatggtataaatccgttgagaagctgggttggtactggttaagtcgagtaagaggaaaagtacaatatgcagacctaggagcggaaaactggaaccctatcagcaacttacatgatatgtcatctagtcactcaaagactttaggctataagaggctgactaaaagcaatccaatctcatgccaaattctattgtataaatctcgctctaaaggccgaaaaaatcagcgctcgacacggactcattgtcaccacccgtcacctaaaatctactcagcgtcggcaaaggagccatgggttctagcaactaacttacctgttgaaattcgaacacccaaacaacttgttaatatctattcgaagcgaaatgcagaatgaagaaaccttccgagacttgaaaagtcctgccctacggaattaggcctacgcccatagccggaaacgagccagctcaggagcgtttttgataatcaatgctgctaatcgccctgatgcttcaactaacatgttggcttgcgggcgttcatgctcagaaacaaggttgggacaagcacttccaggctaacacagtcagaaatcgaaacgtactctcaacagttcgcttaggcatggaagttttgcggcattctggctacacaataacaagggaagacttactcgtggctgcaaccctactagctcaaaatttattcacacgtggttacgctttggggacaattatgaggggtaactcttagtcaccgaggcgcgatattcgtataac

SEQ ID NO: 10014 - DNA, 586 bp, Zea mays
tcgagctcggtacccctgctgcataaaatattttgtttgattcgattctcgtgttctgcagctgctgccggtaggtgtggctgagcgaccacagggtccgacgggcagcatcgctgaccgaggcagcgtaggtggacagtggcgtcagggactcgtgagcagacagagtcctgaatcccctgtcacctgcatccatcaccctgacgtggatgcgagtgatgtaatagcaagcccggggaggctcgctcactcgcctcgtctcgtacagggggcggacgtaggtgcctagcgcatgcaacacctcctgcaacaagttggggaagtgccccgtctcgaacattgatgtgtaatgtttgacaacaggaccaaaccccatgaagttgtcctgctgggcgtagtcagcttcctcgttgacgtgttcatctccaccttcttcgtcgtcgtcatcctcgtcatcgtcgtctccggagtcgtcggggtcgtcgcctccgggtgcaggtgcttggaaggctggtgcagacagtgctgacatcgatgacccagctgcgaaggccagggactcggccaacggggtgggggtcggcag

SEQ ID NO: 10015 - DNA, 466 bp, Zea mays
tgctgccggtaagtgtggctgagggaccacagagttcgcctagcagcatcgctgaccgatgcagcgtaggtggatagcggcgtcagatactcatgaactgatagagtcctgaaccctctatcacctgcatccatcaccctgacatgaatgcgagtgatgtagtagcaagcccgagggggctcgtatactcacctggtctcatacaagggtcggatgtaggatcccaacgcatgcagaacatcctgcagcaggttaggaaagtgccccgtctcgaacattgatgtataatgttcggtgataggccatatccctacgatagtggtcctgttgttcgccgttggcttcctcgttgacgttctcctcttcttattcttcgtcatgttcatcatcgtcactgaagtcatcttgatcttcgcctcccagagtaggggcttggactgctggtgctggcgatgctgaagctgac

SEQ ID NO: 10016 - DNA, 587 bp, Zea mays
taattcgagctcggtacccctgcgttgggcgtcagcgacgacgacggacgacgacggacggacggggagcaccagccaccactcgcctttgcgctaacgacccagcagcagcgacggtcaaatcgcggttactgtttgtgcctgcttgattttgctagctagcttctcgtacacgaatctcctccccgccgctcgcgttcataagcatttatccgttcatacacaggtcttcgcgggtaaccaagcaacgtcagcattcagcagcatgcagtgtggaaaaaaaaagaattcagggtaccggcgtcgacagacgacaatgccggccgccttcgtgccatcattgcatgctgaaactgaaatccaaacccatgcatgtacggcactgacaagtacgtgtacgtggctatacgtagtacgcgcgtgcagaggtattattagttctcttgatctcggagacaacggggcggggaaatgtatttcgggatgaaattatatgtatacatatatatattttttagaaaagggaaacattatttatatattccagcggtagatgcatgcatgtggctgttcaaacttacaaaaca

SEQ ID NO: 10017 - DNA, 448 bp, Zea mays
tggtatcggagcgaatcccatctcttcagatattatgaagcatttcaaaaagaattttcaatacttatccaagaaaatttctttcattcttaccttgccactttctggaagtactcatcttgtaatactaggtaatagagtgcaatatataggaggttgggaatcaacgaaggttgattccgtaattatccattcatcatgtttaaaaaatatactaataaattttcccccttatggagatatgctgcgtatgaggaaaaccgcgcgcaagtccactagacctattggcgtgcctcgtcatcagttggctccaagacatgaagggagcagcagcggcagcgacgatccaatcggagacttagtagcccaaatggaacatcttcggacggagttacgtcaccgaaacagggtgtgggcagaagatggtcagcgtataaatgagttggca

SEQ ID NO: 10018 - DNA, 468 bp, Zea mays
tgcttctgcatttagctagaacagatgacatgtttttctgactgacaaatacgttgtgaactgatatacagaagcaaagcatcctacagaaacatattgccgcaatgctgagaatgacctagctcaatattcacagtacttgtgaaaaatgatcttgagatatccaaaagaacgttgacatgaaagttcaatgtcatttgttttcaaccaaaaattagctaagtgagtacgaattacaaaaaaaaaagagtttgctatgttcaggaccacttagctcactagtcagtattagctagtagtactaccaatgatactgctaagacatctagcagtacatatggttttgacctagcaataaaatacaacagtggtggaatgttgaatccttaagcaccacaattcctggtgtcacatgggactcacaaaactatgtttattttgcgatgttttatgaccacccctaaggca

SEQ ID NO: 10019 - DNA, 503 bp, Zea mays
tgcacttgggcgccctcgcgaacgagttcccgacctcctgcagctcctgcaacaacaacaaaaggttcatccgccgccgcgtgacgtatacgtggatgcgatgcaaatgcgtgcaggcacacctggaagaaggaggtggcgatggccaggtccgtgtcatccctgaaacgcatggggaagatagcgtttatcttctcagcctgcagggcgtacgtggtacgtgtaggttccattgttagcgaacacaagatggatgcatatgcatgcatatggccatatgggccagtcagttttgcattgatataataatgcaggctgcctgaatgttagttctagtttgctctgcgcggccgggcatgcacaagaacaactggccggacgacgcaccgtcttgctgacgaagaagggctccctctggttgttgtacaggagcctcatcgtgcccgacgagccgaggctccccagcatgtgcttcaggggtaccgagctcgaagtagtgtcat

SEQ ID NO: 10020 - DNA, 553 bp, Zea mays
tggtaaatcagatgatggatcacagctaggaatcgggaaaccactgattgtctggcctacggtggaggatgttcggtgctcgatagaggtagaagaaacttaagctcaaatggattcttctttatttgtgcacgtacgaaactataatgaacagaaggccccatgctgtctgtgcgttcttgacccttgacatgtatacaacttttttaaaactagtaggttgtattctaagatggatatgtactggcatcatgattcatgaacattttacgttcagacattaatgtttcactccaatcaatgcttgctagatacacggtattaatttttactaatcatatttacctgtatatcatctactccctccgtcccaaaatataattcgttttagactaatcacatattctttaagtaacatatgaatgtagtttccatgtatgtctagattcattatcatttgaatgaaagtggacggaaaaaaataggcagaatggaaggagtatcttattttccaactattatctctgtttcatattcatattagggttatgca

SEQ ID NO: 10021 - DNA, 494 bp, Zea mays
tgaaaagaaatatctaaccttttcagagaggtgtataggtaggaatgcctatggcttagaaggatcagttttggccaaccacagccatctcattttaagggcccaacccaattcttttaggctgaaaatacccatccctcccaactcaattggtctacaaacccttcctcacgcccctaaacagtgaccacaactaacctctcttcctttcagtatgaatccctcccaactcaattggtctacaacccaattttatctatagccttgagagctcctggaggcaaatcaacagccattgcgaggtaaataagttttcctgtcatcacatattgaacttgaacctttctcccagcccttgacaataattcagctttccacccatgtaattggtcagcaactttatcgataatgggctgcactagccctctggttagtctcattagtgacagggacaagccgatataagtgcaagggaaggaagacctggcaaggca

SEQ ID NO: 10022 - DNA, 488 bp, Zea mays
tgcggggaccgcgggaacaccgtggcggcggaggcggcggaggacgacgaggacgaggacgaggacgacatgccggccgtggcgacagcgaaccaccggtcgatcaatccgtcgctgctttcttcaggtacgtgcgtgcgtggcgcaagcaacagcagcagggcaggcgaagcaacactgcaacagggccggctggcttcttgtcccgatttgacgcggcaacgaacgaatcgagctgagcctgggaggtgtggtggtgtacgtgagtggaaaggcggcacgcgattgctgccgggctacctgattgattgatggatagatagtttagtagtatatctctctcatcgtcgtcctcatcatccctctttctctctctctcctctttgcctttgtgatctgatgggtgtgtgatttgatggtttggactttggagtgactgatgtgtgatgcaatggaacctagtatgtattggatcggttgttgctgca

SEQ ID NO: 10023 - DNA, 550 bp, Zea mays
tgcatttgcagcatattcctgcaatgctttatttcccggttctacactcaaggcaaactttgcattactctgcatagaggaacatcaggcattaaataacagatagatgcaggagactggaaatgaaatgaaaaattactcaccaaggtatattcatgcccacagtatacttttgtatcatcgggtagagctgtaattttctggagtgaggcatacatctgcaatgagacaggctcaaatggtcatgtaatctcaaagatacatggaacagcattttccataccttctacaaaaaaggaaaagttactgagccgtagatgataaattaaactacaaagagttcacaaccttctagatctttattaaataactaaagcccattaaatcataataatcgttagatttaatcacaattatcctctatgttcaaacaaatgaaagtacaaatactgacataatgtagaacaaactcagtctttcaagttcatgaaccatttttaacctatacacatatcttgcttactcatgcttataggttctaatagttgca

SEQ ID NO: 10024 - DNA, 521 bp, Zea mays
tgcaagtgaacgtcgtgcccgacttactggattgaagcaggcagaggacataaagaagttagagatgtcagcaacgccgaccacaacagtgtgtatttcatcggtagagcaacagggagctgcttctttaagtgcgaagattaccaatgcttctgtttctgaaggacagaagaatcctggaaattatatgccttctgccatttcaattcccgtggggagccatgttctgggcctgggcgcaacaagtattgaagaaacaactgccactatgataactcaggctcctgcagtttcaaaatcagaacgaagaaaacttccaggaggcagtcaacaaggtattatttattctactcagatcatgatcaattttcttggtccagatgagaagagtggcataatctttgctattattttccatggtaacagtaacagtggctgacatgacttgtacatgttattgtttttcctttttcgtaggtattcagtttgagagttcagcatcaaaaacaaagatggtatca

SEQ ID NO: 10025 - DNA, 555 bp, Zea mays
tgcgactgcgagacgaaacgacgagtcgacgcggcgtgcaggaacgaaatgatagatagataggcgaccggtagggtctttgccgtgctagctcgccaccatagtgcgagaccggcgccggcgccgccgtgcgcggcgcgcccgttgtgggtcggtcggcacttggcagcatacgtgtagggagcttgcaataacgtcgtctcatggcgaattgtcgatcacgcaaagcgccgcgcgggcatatagtatgtgcgagttgggcatatatatagtacgttgcgtagcatgccgcccttggcacccgcgacgcgcaccgcaaggcaaggatgagcccccctcggccaccgccagcgctgacgtcgcatacccctttgggccggcggaggtcgacgtcggcgaactgattctgcactgcgccagtcgacttcagggctcgatcgccgccgatgatgcctcctgcatgcactgcgccagtcgacggccggcggatgtcaaaaaagcattaatattgtaaaggagaaaaaaaagcgtgcataataataaaaaaacttgaca

SEQ ID NO: 10026 - DNA, 479 bp, Zea mays
tgcctgcggctgtgtgctgggcgtgtgccagatcggagttaattccttgtgtacctacgactacgatagacatcgtccggccctgctagctgctgctgctccctctgcaatgcatctttgttcgtgtaatctgatgtttttaactgttttgctgcctgtcgtcgtattcattgtgtctcttctggtacaccgtacgatacgcagagagtcacgtgactgatctctctctctctctctctctctctctctctctctgcgtaccgcgtacgacctggtacgtacctatatgtatatagcatcaaacctagtacggagatacatatatacatatactactgcgataacgtacgaaaggcggatccgtacactaccccctacatgggatattgggatgcgatagctatagatacacgtgtataccctggtatgtacatggacaaagtacgtactgaatatttgtatgatgcagaatgcaggca

SEQ ID NO: 10027 - DNA, 473 bp, Zea mays
tgacgcaacacgcggccgcgccaggcgtcccggacaaggacgcgtcgcctctgctcgaagagatcgcggtgccgtccgtcgccgagctggcgtacaccggcgtcaggttctgcccgacggtcggcggcctatcgacggtggacttctgcccggccaccgcgacgctgcacctcccggtgattggcgtggacgtgaacagcgaggtggtgctgcggaacctggtggcgtacgacgatacgaggcggcggcgggcctcgggccgctcgtcctcgcgcgctacgtggagctgatgaacggcatcgtcgacaccgcggaggacgcgcgggtgctgagggagtgcggcgtcgtgctcaaccacctcaagagcgacggcgaggtggccgagctgtggaacggcatgacccggtccgtgaggctgaccaaggtgcccgcgctggacagggtcatcgacgacctcaacaggcactacggca

SEQ ID NO: 10028 - DNA, 510 bp, Zea mays
tggccgtccctatctagctagagatccttacctccttaaaactctcctaaaaactctcaacaactactaactgataaccttcctagataatctcaactaatctactagataatctcaactaatcttctaatcttatctctaactatctttatctaatcccccttggagggcccatggctgctgctgccgcaggccctccgtgggcctccttaggccctgacacaatgccactttttagaatcctagcttcaatattgctttttctacttgctttgcacaatatttaccgtgcattttctatgattgttgcatagaacagcttgtgtcttgtttctgtatgagtttagtttgacaaggatattttgacctgaacaggtaaagatgatcatggccacgaatcgacctgatgttctggaccctgcgctcctgcgtcctggacgtttagacaggaagattgaaattccgctacccaacgagcaatcaagaatggaagttctaaaaatccatgca

SEQ ID NO: 10029 - DNA, 471 bp, Zea mays
tgcgcgcaccggtcgcgccaccggcgtcgcagctcgtcagcctcccgcgccttctcctgaaaaagaaggcgatagtttccacgtgtgtcagatcgtacgctgcagccacgcacgacaaataggagttgtgggacgtgtgcgtgtgcgcgacacgacgtgctgcgactgcaacaacgataactaattaaccgacctgcgcgcggtcggccgggcgtccgctgctcggcgtcccgatctgcagccactgcgacatcggctgctcggccggacagggagcacgctcggatgaagccatctcggcgcgctcgcgctcgtagccctctgcgcaggcgctgcaaaggctcggcgcccgttgcattggggacgtcatcgccgttgacagcacctccacagagctgctcaggatgcccctgttaactccagcactgtcacatcaggaaaacaaacaaacataggaggattcagtgagca

SEQ ID NO: 10030 - DNA, 574 bp, Zea mays
attcgagctcggtacccctgagcaagcccttgcccttgcccttggccggcccttgctgtgccccccggcccttctctctcctctccctcagtccctgtcttgtcctatcctagtaaaagaaaggacagtttgattgcacaggtagcccaccgctcaaatcatccgcttcccctcgcccttcctctctcacacccaaacaaacaagcctgctggatcgaccgagttcagccgagctagctacctaccttcagaaaccctcgcaagctagcagcttctctcaaccctcgacttccttctacctatacaaccctaaatcagtttgcttccttcggttcttgcgaattgccaggaacgaaagagctttgccgctctcgtgttacagaagactcggaaagagagatcgagaggaaggagtaccagatagacgtaccagcaggcagcagctagctagaggggcgagcgagccatgtgcgactacttcctacaaaggatggaggacgaccgccaccaccaccatcaggccggaggagacctcacggacgtcgtccgagccggcggcgcgatgcatcaggca

SEQ ID NO: 10031 - DNA, 505 bp, Zea mays
gtttatgtctcagcagcaagctcttctaatggctgctcttaaagctggaaattcaccacaaatagttccagggaatgccaatcaactaaacactaacgtttctaatccccctcttggaaccttgcctttccaaaactggacaaatcttggctatcaaaatcctgggttgactctagcagcagcacagaatggtgccaccaaggttaagagactttatatgtatattttttttggcacaataatatccgaataatattttagcatgtgctatatcttcctctgttttactgcctgacaggtttcgaacaacaatcaagacctctcttctggtacctttggttttggcacacctgggtaagctatactgcctgctagttgcagattggcggtcgctgtaatttcatgctgcaccaaattggattttagagtaatgaactcagtagttgatcttatgtccattttgctgacatgtcctgttgattgcaggatgcacaacattactcca

SEQ ID NO: 10032 - DNA, 477 bp, Zea mays
aagtcctccagcatgtaattgatggaacaaattccaaggcatcttatgaatttgatgaatggatagacaaatgaagtcgtctttcaagtcactgtcactctgtttaaggaacttcaggatagcatgcaatactcgaaagagactggacatggtttgcccactggtattaagacgatgatcactaagtgctgtcatgaagcttgtgattcttgtgcctgaactagtgctgtcatcaatgttggagtcggttgtagaacgtgaagtgttatgaacacattttaatgctgcatgtatagccccccaggcaagctcaatgaactgaatccaaatggattcctaggaatagagcaacagccgtggagtcaacagttagtagacagaaaatgaaactgaatgcaccaaaagaggaaaagggaagtgtatgagaagcgtacaaacttaattagggtactagatacggaaatgaggatgttgcca

SEQ ID NO: 10033 - DNA, 498 bp, Zea mays
tgctttttctacaagcagtcgtctaaactgaccctaattaagtagttaggttacatacattcatgctaggattatatattttcctttatatctacaaactcagttcagtttgcaagctttgaagaaagactatagggaagctaaccgacgtcagtttgacaaggacttgttgaggttttgctgtgctgcctgttcgcacttagtgcagtgacgacacatccacggataataataacgcgctccatcatggagcgaggttccctttctctctctctttttcacacgtcctctctctccctcatcgcctcacttcaccgattccttagccgacagctactcttgtggccatgaaaatttccttctgctaatcaacgtaatttcttctatatgcacactaccatattatatatgataaataataagccagtcactatatatgtgtatatgtttatattcaacatctcctcatcgatcgacgtgtgtgcggtttaatttcca

SEQ ID NO: 10034 - DNA, 515 bp, Zea mays
gactctagaggatccccctgctacctgtttgtataaataagggccaacttttaaagcgagaaaatagctaaatggtaaacacaaggaagttgtgaaagatgaatacactagtccttcagttcataatgaatatggcacaggtttcttattcaaataaaaaatatactccctccgttctttttttatttgtcgcgttttagttaaaaaatgaactagtggacaacaaatattcgagaacggaggtagtatatccttaaccaaaagttgctgaaagctggggttcaatggaaacaaaagggcaagttggatctatcataccttctctggtagcctgtcaagagcacgctggagttcctcagagaggctaaggattccagatgaacttctcattaagccaccatcatccggaaggcagtctgtgagaccaatccattggctaaggatgctaacgtattcacgctgcgatgtgataagattgcagaaggcagtgtgccatccagacacctcaatttcca

SEQ ID NO: 10035 - DNA, 480 bp, Zea mays
tgacatgtcacaagaaacataaatcaaagaaaaaatatttgcaaatgtggataaatgattgatcaaaataatacattagaaggtgagtttcatgatctatgcaggatccacccttttggctaccaggggcagaactcaatgattggtaccaatgtgtgaaacatccatcatccatgtaacaaaaaattcgaataaaaataactgggaaaaaacagtagcttgtaacaggtttcttgcaatctatttatagcaccccctattctattctaattaggcagagttgcttcttcaagaggcttttgcagataagtcatggcttatcagattattgcatgtgaaagcttttaggggacaccatcgctgactcactgataaaattactacagacctgtcgtggtgcttgcttgtgcaactccagcagcagcagcaacctcggcaccagttttctcactcaaggctggtacagcctcagtgtcagca

SEQ ID NO: 10036 - DNA, 469 bp, Zea mays
tgaaggagcctgttagctatccgtgtcatatgaccaacaattcctatccttgggggagatcttccctctgaagacaatgtatgctgcaagaaaaatataagtgaacaaacaaatataaaaaaagatgataaaggtaaaccacagtgaaacaatggacgtagtaagacaatttgatttaaccttagttaaatctgacgacagagcagagttcttctctgcttccagaattcttgtaacaagtttacagtcatcaaggacatggccaatcagtcgatcctgcttactctccaaacatgagccgatgatattctcgacatggtggtgcaagaagttgttaaatgggtacctaatgatgaaatctgtcaggatttcaataatttttatatgcagattccaatatctaacttactcaaaaaatagatctatagcatgcttgattgctcctagttgaatcagtcgtgtttcggca

SEQ ID NO: 10037 - DNA, 587 bp, Zea mays
attcgagctcggtacccctgcctgcaccggtcaccggcctcgaacgcctcgaggcagaccgcgcagtccccggtctcttctccgtctgcggcagccttgaagtactcatggcaaggaagcgtagcgagctcgccgctggacagtccccggcggccgcggccgtcctctacgcggtcctcctggttggcggcgtgctggctgctgccgcgggagccgagcccccgcagcagagcccagaaaacgacgaggatgtgggcgacgagcatcacagcgacgcccgcgatgagcagcaccacggagaggatcgcggttgggttggtcgtcgtcatgctgttgctatggtagcgcgttgtagctagctagtgatgaatcatgtaactaagggtcgtgtttctcatcgatcatgtgaagatttctcttgcttttgacgttccttggtttggatttggatacatatgtagaccagttctagtacatgtgttgggagaaaccaaagaagtgtggcgacgacctcttattgtcatttcagcactgtacgtaggggatgtgcgtagctgcgagtcactgatagctacaagcaagaaaac

SEQ ID NO: 10038 - DNA, 561 bp, Zea mays
tggaaactgttttgcagttagaagttttttagatgccttgaaccaactttttattttgggaactctttcagatgtaatgccattactagaggaagtatcactgccaatcaatagagaactccaagagtacaagacctcattcgctgtagggactgtaaaatggaaaatatgagttttgatgtgaaataatcttagtctcctgtaaataaggaacacagcatcaaataatgaaaagcagacatcagtacatggatacatttaacaaatgtgccttgaaaataacaaacagttcaggttttatgatgagtcctagatttacagttggaatcctagatttgtaatgaaaataaaatagaagtctagctatcggtacgaatgcatgaaatttttatagttgaataatttaaagtcccatgtgtacctgtttccatattggctggtaaagtcttggcatggttagaggtgctcttggggctgcatgaacagctttttcgacttctcagaaccaatccaacaacgaggagtacaaatactgtacatgtggcactagccattgcagca

SEQ ID NO: 10039 - DNA, 486 bp, Zea mays
tgctgccaatttgaccggtgtctttcaggagcaccgttcttcacagaaccaacttgagagatttctttgtcacaatgcggtacactgaagatattctttatacacatgcagcgcgatcgaaatcgcacgcctttaggtgctgcagaactgtatttttttttaacttttcagggaacgatcagctcacttagacatctgctctttgagatctggatttcgtctcatacttcgatgtcccatatatatatagtgtgtacttgtacgtatataatatgaccattgaaactgtaaactgttttgtgcatgctgtaatttgtaagaacgactcctctatgcaaatctccaacttgtagaatggattggctactgttgcaaaccattgtactacaatggtactgatgcgcattcttgcttccaactgcacttgcaacaattttgtatggttatccaaggaccaacaaaatgtgtgttcctttgacctttcag

SEQ ID NO: 10040 - DNA, 492 bp, Zea mays
tgctggttttatttgggcagcttctaatatcaaatctgttcgattttctgaagctaaaaaaacagaatgttttgggatctgaatgtgcagggccacgactacacgctgctgctgaacgaggcgtacaaggttctgatgcgggatgtttccagttccaggcacgccgatggaaggggcaggagtagggtggggtcaggagccggttacaccggggacggatacagttcttgggaagggcccgtgagaagccaagctctcttcgtggacgagaacaagtgcataggatgccgggagtgcgtgcaccatgccgctaggacgttcgccatggacgacgtcctcggcagcgcgcacgtggaggtccagttcggcgacctggagcagcagattcaggtcgttttcgtttcctgacccgactctgacagcgtagaaaaaaaatcacctagttctctgctgattagttgaactgtgctgtatgttgtttgtgcaagggca

SEQ ID NO: 10041 - DNA, 538 bp, Zea mays
aattcgagctcggtacccctgctagtggcggttacagggagaggggaggaagaactaggctctggtaccatgttggagagtgaaaccccaaccctaatttagggttgggtgtatattgtatagacgagttaggtgggccaagcccattacaagagaaccctaacctaaccctagacaagattctaacatatatatgcactatggttgtgcaccatttcaaaaattttgagaatttctaggtatgtgtttcaagggatttttcatgattgcattgcaccagacagggcggttggcactttgcaccaaatatttggcctatttttcattccttcaatctaaacaggtcacacagctaatgaatggattgctaaaacagttaaacaagcttaggatacaatgaatcttacagtatcattgtcctgttagctcctaatacaggcaacacggatacatgtatgatcttacctggaatagtttcctaagtatattaaatctgcttaactaccctagagcttagaaggtcttaatggttattcag

SEQ ID NO: 10042 - DNA, 435 bp, Zea mays
tgctaaccagacttggttttctgaggacctgatccttaactctatctttgaactgggagtcccgatcatgggtgtaagaatgacgccatcaacttttcttttggtcatttgttttagggtaagtatccgtggtacacttggtataatactggctgtcattgtcacaacttgttctctccttgcactacgcaccaacttatcctgctttttccctacttgacatgtattggtttgtcattcagttgatcaaaccgagcctgattgggattgcattctccggtgatacttacatgcgttcatgtccccatcacagccatctgtacatagttttatggtctctgtcacccatcttcagccaagacgagagaggtaggggggaagtttcttgccctccgcgttgatcaagcaaagagtagaaggaaacgctctttgcag

SEQ ID NO: 10043 - DNA, 473 bp, Zea mays
tgttggcgggtgcacttgaaaacatgttcctattctttaatttccacacgctgctgtcgagttgccattgccagtggaagccacgacgccgtgctgcctctttgtgcgtcaaccatcggcttttgtagcatatatagcttgatttgctatgttctcttctctgatgcagtagtatagtagtacatatggccaagaccaactgaatgactgaacctcggagctaattgtcgatcggccctgtgtccaccacaccactccgccttgttcctcacatggagggattcgaagaagaagatcgaagagggtagtgcgcagctagcaaagtcacgctcaccgctcaatgtatgagctcctgtaacctctcgttcgtaggtagtgcggagtctgttggtgggtggaaaagggttggccggaggtctagaagctaccggtgtgtggctgcaggttttcctccggtggatcttctttcccag

SEQ ID NO: 10044 - DNA, 551 bp, Zea mays
tgcacttaattccagattactatggccatcagccacccagactataaaagggaccgatcatgggctagtgacagaaagataatggttttcaatcaaatctaatctccacgcaatattcctgcttccacgaccaacatcctttttcagatggtgatcacacgcaaccgaacgtatacatagattaaacaattctaagatatcaccagaatctgcacatcaaatcttgcctcaacagcagagaagttcatgcgtataactaggaaatttaaacagagtacgtgttccagcaatcaattcgagaacaaaatgaaacgcccttacccttgaggtagaaccctttcttctcgaagcgactgatgatgtccccgatctgcgccaagaaactgcgagttaaaagctgggcaccaagcgtgaaacatgacgcggaaacccaaacgaaaccagaacttgtcctcgcgaacaaacataaaaccgccgggcagccgggatcaacagagaccctcctgtatcagactctcctatggaaaataaacggggaaaaaaaccaagca

SEQ ID NO: 10045 - DNA, 468 bp, Zea mays
tgacacttggagcaaggaatctgatgctattcagaattcttcattaaaggtcttgatttggttcaataattattttaagaaactaacctcaaaaacaggcaagctatatctttctgagtctactgctggtgtcaaggtacattcaaatatttttcttcaagagtttgcaatgtgtctatctgtttatggcaagaatggatgcagtgattcagcaatgtgcagtgcagttggaccattttctatggatacacaaaagaagcaccttgaaagcactgcaaagttaacacacattgaaggtccagactctggtgttttcccgtcccacggatcattgacttgtataagttatactgcttcccttgtgacgaaggataaagcaaaaacatatttgttggagagccacaatgagtttgagtttgagattgggacgggtgctgttagtaatcagcttgaatcatgtgtaactca

SEQ ID NO: 10046 - DNA, 497 bp, Zea mays
ctacttcgagctcggtacccctgggaaacctgcttctgcaatcgctcattctcctccatgagaagcttgttcattgcagtcaactttctgttcacggactggagcctcgaagactcattgcgttgcttgtcacggcacctaacaccatgaaagaatgggcacagaattcagctagagcggacaaatcagaatcagcattgctatagtaaagggctggcgaaaatcaagaagacgaactacgttttggccatttgctcagaatagcatggaacagactttcaggtttgcacgacatcattacgatgtttctacggctattcgttttaccaatcacatcattacgatgtagaaacaaaaggattcatcgagattcacttcctcgaggataagctccaacagatttgctgactaatttgtcagcgctcacctccggttctggaaccagactttaatctgcttggcctcgatgtttgagaggatggggcactcgcgtagca

SEQ ID NO: 10047 - DNA, 515 bp, Zea mays
tgctgaactttgttaaatatagttttattaaatataaatagttttattatgggtcagaagctgaactcatgtgttgtctggctgccttaaacccgactcagatttattttattttttttgaacccaggtctcaaattgaactggccagctaaaccagggtctgttcgcacgtagtttataattaactactagatagctgattagggcaattaatatgatgtcttggacctttttctttcttaatataatgacgtgcagtcctcctgcgcgttcgagaaaaaaaaaatatgatgtcttcaaggaaagaagtcgtcattagttccaacgctgaaaagcctcaaaactggccggggaaaagaaaatccctggcatgttcctgcaaccatgcaggcaggttgttgctgtagatacggtgcatacatcagaggaatttgatcggctctgcctgcagtgccttcttcactagctctgactgctcctgcgcatgaaccgacaggaagcctgttgctgtagca

SEQ ID NO: 10048 - DNA, 528 bp, Zea mays
tgttgacttggtccaggaggaggaggaggaggagggtgatggggaggaggagccgctaatccaggccgcggagtgccgcatatgccaggaggaagatagcgtgaagaacctcgagaaaccgtgtgcttgcagcggcagtctcaaggtttacacccaatttaattaaatcaatgcatgccattcttatctccatagagctttaagcttcacagttgttcatgaggtgtacatgcaattaaaatttccgcttttggttctctttttgcattaacatgtgtctgtcatttccattgacatgttttcttgattaaaaagcacaaaacgatcacatggttccattcataaccatgacactcttgtaggaaacacactcatctctccccaatcactactgcatcatatcctgtaatattgcctgtctatatctgctctgttgggagagctccaagttattcattcacttctctatgcagtagagttgcactatttttctaccacattgctaacaggaatggaccagttgattca

SEQ ID NO: 10049 - DNA, 479 bp, Zea mays
tgatgaatgtgtagcttctatgaacctaacagaatagcgagtttgtccagaacaagacagactgacacactgcacccaacaaaacattttgcatctctaaattcaataagctatgctctggttacaaattaaaaaaacgatgattctcatcttatgaatatagaatgaaacacatgaaccacatcaaactaaacatggaaacaaaaacatagaaaccttgcaagcagagaaaaaagcagactaactgcatagttgttatcggtttagcaaaacttaagcataaataacatcatattctcattgtaacccttgatctctcactctataaataaggaatcaatcataattgcaacaacccaataattcctaatgaaaatttacactcagactataataaaatgtgcatacctaaatatcagtgcccatgaactcacatcctagtcttctggtgaagggctcagaaccaagcacagaaaaca

SEQ ID NO: 10050 - DNA, 516 bp, Zea mays
tgctccccgtgcattctcccatggaacatcatgtaagttggatccagcgtcagtatcgccctgacgtcctgcacagccaactcgcactgctcgagtgcaaggtagaaccacgcccggagctcaaggcaatcggtcgccatcttgaaaccgacgaccttgctgatctctgcaaccgcggactcggcgttgtcctcctctaacaacgtgcaggcacggtatttgtacgggaacgtcatcgtcgggtccagctccgtcgccgcctgcagatcagccaacttctccttgccgacacagtacagggagcgctcttggtacatccacccggcgggttcgtcgtagtcgccgacgacactgttcattagcttgtacgcggcgtacttgtgcccgcgcttgtacttggcgcgtgcctctccggcgagcgagtagacatgggcctcggcaacggcggcctcgtaccactcctgcgcctcctcgaactcgccgcgctgcagcatcacgcacccgagctggtgcagc

SEQ ID NO: 10051 - DNA, 520 bp, Zea mays
tgctccccgtgcattctcccgtggaacatcatgtaggttggatccaacgtcaatatcgccctcacgtcctgcacagccagctcgcactgctcaagcgcaaggtagaaccacgcccggagctcaaggcaatcggtcgccatcttgaaaccgacgaccctgctgatctctgcgatcgcggacgcagcattgtcctcctccagcagcgcgcacgcacgatatttgtacgggaatgtcatcgtagggtccagctccgtcgccgcctgcagatcagccaacttctccttgccgacacagtacagggagcgctcttggtacatccacccggcgggttcgtcgtactcgccgagaatactgttcattagcttgtacgcggcgtacttgtgcccgcgcttgtacttggcacgtgcctctccggcgaccgagtacacatggccctcgccgacggcggcctcgaaccactcctgcgcttcctcgaactcgccgcgctggagcatcacgcacccgagctggtgcagtgcca

SEQ ID NO: 10052 - DNA, 512 bp, Zea mays
tgtggcgacgattcctgagccaagatatcttgttgcgatcgatcagttgcctatgcctctcctcttccgactcccacccctctctctctcacccccaccacatcatgcctcctcctttcatggcagagacgcagacgcaacagcgagacaggaacagcatcatggccaaccagaatgctccatcgctctctccatcccctcgacagagacggagagatggggttagaaagaggggcagggcaaggcaacaacatgctattgcaatagcatagggacactgcagctagtgctagtacgtacgtatctgactttgcttgtactacctaccatgcaaatcaagcaagcaacgagctcagcatcgttcgtttgttcatgcgaatttgtgatgatgatgatgatgctctccttcaaggcgggcacgaggtgtggtgtgaccgatccatcacatcaatggctgcacaggtcggagagctccttcctgccctcgacaatgtcgtccaggaagtcgtcca

SEQ ID NO: 10053 - DNA, 513 bp, Zea mays
tggtttccttatctgaaaatctccagtcatctgccttgctgctcgttcctgcagctcagacgtcgcctcccttctatcccttgctgctcatctctctccgtctcctcagctcactttgccggcagccaggtttgttagccgagccccttcaattggtgtgctcgacgtttcacacagtttcctagccgtccgatacacaggcgtccagctcttcaccattccatcgcttagctcctttcctcttgctcggacattgcattttcctagcccctctgcgccttgggtgtctcggcgctgccatcatcaccctgatctacatcttgttgcccagccatggcgtctctattttcttagttgttccatgccggtgtccgtgcttgcatttgccacagccggcgtcatcaacttcctggtgcccgaccctgctgtccaagctctacagatgtggggagacttgcttggtgcttgcttcccggccaccatgggcatctcgccgtcgacgtatagcctgca

SEQ ID NO: 10054 - DNA, 514 bp, Zea mays
tgggacgacggttcgtgagcgactttcccatatacgatggccgtggctccggcgcccacctcgtcgctcgcttgcagggagtcactgtccaaatcggcagctcgcaccagctagtcagcatcgtcttcgaggccgagaggtagttcaatgtatgcatgcatgcatgtagtgtgtatatatataatgcatgtgcgattcattcattggttcatcgtcgtctgcaggcttaagggctccacgctgctcaccaacggagtgataacggatgggtcagacgagtgggccatctacggtggcaccggggtgttcgccatggccaccggtgtcatacgaagaaggtttctcgccggtagcaacgacgggaactctgatgagcttaccagcatcgaagttttctgcccggcgtttggctcggcacaaccacagccaaacaagcaggtacgtagtgtgtatatgtcagagaaaaaatcaataactcttttaagaatgacagcagcaggaattctcagtaaca

SEQ ID NO: 10055 - DNA, 504 bp, Zea mays
tgttcagtttcgccaagaaccaccgcggcctctaccagaacagcgtgccgggcgctgcaaaattctatgccagcagcagcgatgaggtactaccgatggagaactgtgatccaaacattgtttctagaaaaaaaaatgttcatgtcatgcacttgaataacgcaatatccttgttgcgaacttgggatgcgatcaatgggaacaggacgagatgctctgggctgcagtctggctcttcatcgccaccggtggtgactggtgaggactacaaggccttcatcgccggcgacggcaacgtcggcggagcgcagaccttcttctcatgggacaacaagttcgtcggcgcgcaagcactcgtggccaaggcaagcgatcgagcgcgcgcagctaatagccctgcgatgctaattaacaacgaccgcggccatttggttcctcttgcctgcagctcgtcctccaagggaagctggccgacgccggcaacgcggcggcactgaagagcca

SEQ ID NO: 10056 - DNA, 518 bp, Zea mays
tgcagagcaacctgcaacgtctcccgttattcgcgcgaacccaagtactaaaccaccccacgcaacccccacaaaacggatcggaacgaaaagcacgcgattgaaacgaaacggacacagacagcagcagcgagcgatacctcctctgcgcacgcccaggggttccaattggcagatcatgaggcggcgcaaccgctactccgggagaaacgctctggcaccgggcaaagcggagtaggaatgtacaccagggccggcatcttcgcgggcaacgactctgtcgtcggtccgaggacaccacccccccaagcttgctccggctgcccccgagccccaggaagacggcgaagaatcgacggcggcgaggcggggagatcaggaggttgacggtggtggcgcgcgcgctgcgctgcgctgctacagcggcacaacacagtgggttggaattatggcgaggcctcggacgcctctaccttgttgtggtgatgactgatgagtgggccgctctccccgctgca

SEQ ID NO: 10057 - DNA, 543 bp, Zea mays
tatacgaatatcgcacctcgtgtacccctgatttttttaaaaccacaacaaatacactgctctagccaatgaaaatccggttgtcatatgatatgagtccagtttagaaaatctggtggagaatccagagtgccttcttttgtaggctcttttttattcatgatatataatattattgcagatactggataaggatcagtaggataggatggcttgcttctacagcctaaactacctgagcaattcgcaacatgtttctccaataaatatgatctgacaaaatccatgtgcgggatgttagtgcctgtatccagtgtaaccagcacttgggagatttctcaagtgcaagatccatcgttgtgttatttttcatgtccaacacggttgaatttttgccaaacttacataaaagcacacaccatagacttttcattctgaacaccaacactataataaggccagaaggaacttatgtaagctttagagcaatctaacaacaatcatgctacgaatgacatttttaatctgattccctaggcaatg

SEQ ID NO: 10058 - DNA, 549 bp, Zea mays
tgtagcaccagagtaaaccaagatgtacttaggattcacagactgcttgaaacatctattttttacccaaatataccataagtatggtgtggcaagtaaaccaaggattgacattagatcagtgttgcataagtagcatgatatgatgtattgttttgtcctgtacgaaccaaggttcacatttccctgagggccccattaaagtaaacatgaaaataactcaaggaaaaggaaggttaccagttgatcccctagctccctgaagaagagcaaaaagttgtctcctcccttctcttgtgtatgcagctttgttctttgcagcttctgtcccagacatatcctacaaattgaatatgtcaagtgtttctgaaacccttgtcattaagtaccaaaaatatttaggttcatagttagcatggtctaaccgcaaaaattactgcagccaaattgaatttgggatgcactgccaaatttttaattcggggtaatgggtacactgcttctccaccttgaagagttagtatttttgtgatatccattgtttcaaca

SEQ ID NO: 10059 - DNA, 480 bp, Zea mays
tgcagtcatccagacaaagcatcgagatcatcgcatccgaaatccaagtcggggacatgattgtcgagagcgctgctggtgctctagagctgctgtacccatgcaggtgtggcgattatttctccatcacttcgggtgaacttagcgggatggggattgtcgtcactggggatggagaagaagtagaagagctgcaggcgtcggattctgcgtcagcttctgtcgttctgggctgtggctcctgttctctcaaaatacggctggttatagatggaacctcatgatcacagttcaggctctggttgcgcactgttcagcagtgtggtcagtttgaaagcttaacaaccaccaccacatgtttgtcaaacagtacgcaattcccggtctgctgaaaattgtgcagcttatcccgatggtggttgcattgtgataaatggcgttttgaccgttgttatcagctaaccaccatcgtcaagtcca

SEQ ID NO: 10060 - DNA, 439 bp, Zea mays
tgcaattttgctggagatttatcggtaatgccttttaatagaacccctgaatgatatgattcaagttagccatgctgctcagaagcatgatcatccaggatgaacattataatataataatatatggtatagtctgctacccaagaaactctaaaatactgaagcaaaactcggtacctttctacatcctggactgcaaaagcaatcaatagaggtaccaggcatggtacaaccagagtctgtcccggttccagatgaacaagtttggtgatctgcaaagtgcaaaattactgtgtaaggaaatgtacagatgcacatagagagaaagatgcacaaagtagaaagtcttacatttccttgaacattgcaaacaagaaagtaataactcaggagaagatgatggcttttcttggggaaaaccacagaacctacataaaca

SEQ ID NO: 10061 - DNA, 1038 bp, Zea mays
tgcaagagcataatgcaagatccaaaaattatgaaaattttgtaacttgttcgagttccaaaaaaggaagaacatgtgtatatatatgcagcaaattggagagcgaggttttttttattattgctcacctcagaagagttatcggagtgatgattcttcagatccggtgccggcggcacggtggtgtttgagaagtccagcatgttgctgccgaggcttgtggtgatgcaggacctaggagaggacgacgctaagagcgcctggctcacctgatgagacctaatgttggtccccgatgtctggatctcctcaccaccaccatgtccagggtcatagcaattgtaagctgcaggtcgctcctctaatccttttgacagtaaagctgtggcagcgttgtatctctcgtgatctccgactaatcccccactgttcaattttgtggttaattgcagacatgaattcatacatggaagaaccaaattgaagagaactcagagcgcggtagctagggaaagataacaagaaagggatgcagtatttacagaagctgtcattaccttcaatctctttcacctcgtgcattttcttcctatacacatgttgccaaatgtttcggagttccttcatccgaacaggcttgaggagatagtcacacgcaccatgatgtacacctttcatcactctacttgtctctccgtctatggacatcactgtggaaacagattggagcaatttggtaccttgataatagaaatcgaaaacaagtaacttgcagaaagacatgtgttggtattgaatactgacttataacaggtagatccatctcaagcccaatgagttcgagaagcttgaaaccatccatgtcaggcatgttgacatcactgattacaatgtcaaacttgtttctcctctctcggagaatttggagagcaacgctagccaaaccgcatgtggtgactgtaggtaaagaaatattttagcataagacaggataattatcgatcataaatacatatgcatgcttataatataatttca

SEQ ID NO: 10062 - DNA, 478 bp, Zea mays
tgctagcatatggggaatgatggctttgaggttggcaaatgaagacatcctacccttcaattacatgtcctatgcaattgagcttgaggtaagacgtctccagtgttcactaaatgctgcttctgtaggccagtagagccactcagacacaggggacagaggaaaattaacatagatatccttgttactatggaaacatgacgaagccctaaatttcttccggtggcaggcatacacaaaaacggtagagaatgaagtgaagggaacaactgtcacttgttcccctctgtacaactcaatcagaactctcggagcggcagctaccaaagtgaataacgaacaaaaggtgccttcacttgagaattgctgctcgagttatgcagaacttacagtctaccatactgcattttgttcactgtgaagatgacaagaaacatgggcactttcaggaacttcaaaagctgctcttgagcaagca

SEQ ID NO: 10063 - DNA, 500 bp, Zea mays
aacaaagacgcagcaaactctagacgaacaggatatcatacatatcttcgtcaacgtcgtcgactccgtgctgaggtactgtccagacaagaactcgtcgttccggttccctggggcacagcagcctcgtggcaacttcagtgacgtgttcaacatagctttcttgtccctggccttcctgctgtgcatcttcgaggtccctcgcgacctccgtccgggatgcttgggctcgctaggagcccagctcaccggttccaggtgcagagatgccgcaaagagcctcgtgaggatgctcggtgccaacctcgaggaccagtggatgcagacgatgaacctcgcagtaaccaactggatagtcgagctgagatcctcgagccgctcgtccggccccccgtcgccgctcttctcatagccatgggtatggaggaagctgcagagacaccacaggatgagcgtctcctcttctcactcatttatcaacaagtcgagtgtgtcattca

SEQ ID NO: 10064 - DNA, 515 bp, Zea mays
tggaaccacctgccgatcgattggtgatggccgccgctcgtggagtacctcctcgcatctctctgcaggtaattaggtagatcgcagtagcaccaagaatcagatacagtaaaatcacaaagaggactgagcgagcgagatgcgcgttggttacatacatgttgctgaggagacgggagagggacggtggagaacgtggcgagcacaggcgcctgctccggtatagacatagtcggctccggaaggcggcacgccgcggcggaaacgctgctgggcttgttgcctccggcgacgaggatcttggagatctccgacgccgacacgctccacgaccgagaaaggtactccatgggctccagcggcgtctgcggcggcggtatcgccggcggcgccgcgtcgtcctcgtcgtccaccagctccatcgccatgctgaaagcaccggcagcggcgtctctcggcttccagcgcttctgcatcgcgccgtcctgtggttcctagctagctgcctcagacca

SEQ ID NO: 10065 - DNA, 545 bp, Zea mays
tgtaattttttctgtaggtgggtgcaatgctgtacttgctcattgctatggtaccactggaagcaaccatggcaatggggcggggaatacaagaggaaatcaatcaataaatgtcaagatcaaggggtggctttgactataacccctcttttggtaaatgtctggtggtagtttgcttcgtacttgtataaactgtatctgtatgtgtgcgtcgcaatttgtaaacaaacaggacgagtataagtgttgcccagacatgttagaccatacaaactgaaggctctgaagttgaacataattttgtttcggtggcatcatgctgctctgctcacacagtgggcaaggacagcattggcgggaagccgaagtagggccagcaccagcagcactgccggcgcaccgcgcccggcagatcttctggagctggtcatggataccgttgtttcccccctcgctgacgccaatgatgaggcatccgttggctgtgccttggaggcagagagaccggtggtctgacagccccggcaccgggatcgtcttctcca

SEQ ID NO: 10066 - DNA, 552 bp, Zea mays
tgctagctaatcctgccgtgagtgcaatgcatgcaaagatgacgaagcccgcagccatcgttgttgctgctatcgccgtcctctccgtcagcctgctggctgggtcgtcgtgccttgcccttgcgcggcccagcggcgacttctccatcgtgggctactcagaggaggacctgtcgtcgcacgagagcctggcggagctgttcgagcgctggctgtcccgccaccgcagggcgtacgccagcctggaggagaagctccggcggttccaggtgttcaaggacaacctgcaccacatcgacgagaccaaccgcaaggtgagcagctactggctgggcctcaacgagttcgccgacctcacgcacgacgagttcaaggccacctacctcggcctacggagcagtgttggcgatggtggtagtggtatcgatgacgacgacgagccggaggaggaggagggctacgagggtgtggacggggcgagcctccccaagtcggtggactggcggagcaagggcgcggtgacgggggtaaagaaccagggccagtgcggca

SEQ ID NO: 10067 - DNA, 484 bp, Zea mays
tggttagctggtgttcatggttcgtctctaaaccaagaaattattcaacggtttatctgtatagatacctaaacactgtttaacgctgtagatttacctagagtgaagttaaaggataaataagctggtgcagtgcagataaactataaggccttgttcgtttctgtcggattagtggatcggaatgattactaaccggattatttttctctaatttatataaactttgtttagataaacgaatccgggtgcaatccgacgcaaacgaacagggcttaaaagagatgatgttgggctggaggctggagcacacctacggggttggacaagctataaagatgtcattcaattcaaatctagcggggtccggagcgagcgattcatggagacgcacgaggaggatccgtgccaagaagaaccgtagtagttcgtgcgcccgcccgtgcgtcctgcacgcgcaaatgtcaacgccactccagttcca

SEQ ID NO: 10068 - DNA, 481 bp, Zea mays
tgcgcttgtttgatgtcaggcttaggcaatctgaggttcatgcatttggttggaaacaagagagcagtgagtctcagtcggctctaattaaccagtcatggtctccagatggatggtacatgtcgtctggttcagcagatcctgtgatccacatcttcgacatcaggcatcatggccagaatccttgccagtctgttcaggcacaccagaagcgggtgttcaaagctgtttggcaccgaacgttgccatatctgacctccatatcatcggacctcaacattgggatccacaaatattcatgaaacgttttgggctgattttggcgcttggcaaattttttgttgtggattaggaacgttccatgaagacctgtgaaattttcaggactttgcatcaatcgaagatacagcaaaatcagcatgctttcgctggacctgcttcaccattgactttctctgtgggagaaccatgcagctcagca

SEQ ID NO: 10069 - DNA, 535 bp, Zea mays
tgcctaaagctctttctcaatgcactgatttggaagttcttgacgttggatacaataacattgtagatgttttcccatcttggcttggcaacctttccaatcttcgtgtccttgtattaaggtccaatcaattctatggcacactagatgaccctttcacaagtggaaatttccaggggtacttcttggggatacaaataattgatattgccttgaacaatttctctggctatgtgaaaccacaatggttcaagatgtttaaatctatgagggagaagaataataacactggacagatcctgggtcattctgcatccaaccaatattaccaagatactgttgcaataacagttaaggggaattacgtctcaattgataggattttgacagccttaactgcaatggacttatcaaataataaactcaatggtactattccagatttggtcggaaaccttgttatactacatttattgaatatgtcacacaacgccttcacaggaaatattccactccaattaggcaggatgagcca

SEQ ID NO: 10070 - DNA, 470 bp, Zea mays
tggagatgaggaattagctatcttcctgaagaatgatgatatactggccaaggaggcaaagttgaaggtttagttttagcaatcattgctattctaattcatttcttgttaccatgtgttggtaccatttcttcaagtgattcaattgttggttgcagataaaacgagtcgatccaacattagacatggaggcagacactggagatgattacattcatcttccggtatgatttttttctgcaattatcttatatttttaaaacaaatgtggtctctagattttctcatactgagcatatttgcttgctgtttataatgaagtgcttatcctatgttgaaactactgctcaatcattatgtgtttggaccctcaggaccatgggattcaccgtgatggtagcaaagagacagtcgatgctgacagtgagttggcgaggaggacgctgtctcaggacctgaaccgtcatgca

SEQ ID NO: 10071 - DNA, 475 bp, Zea mays
tgtcatcgtttagaaggtgatttgggaaactgcttctgatgaggacttgccatgatcaagagcatggtgccttgattaatgtgttctttagaagttcacaaattatgctctggtttgccagtccgccttgcatctgatctaaaccttctctaatgaagggatggtgtgacagataatactagcataactagcttaattttccctttaattcaaagtgtattactagttttgtggttaccagttttctttataaagatttgagtcacagttgatgggttggtacttgtttcatatatcttcggtgatactgacatctgactaccatagattgttttttattctcttgcagcttttgactgttctggaaggtgcaataagaccagattgcctctcttctgattttgaaacaagtgagtgtctaaactcacaggttggatctgcttctgtccttccatgggttcccgacactacttca

SEQ ID NO: 10072 - DNA, 502 bp, Zea mays
tgttccaaattcttttccagggctcaaaggattccgctccaatgaaaaaagctctgtaggcatctactagacagaatactcaaaacagtcttgcgtttccttatatcgacatctatcttactaatgtttacagggagctatccttgatattttagaacagttttactgtaatttgaaagcagcaattaccttattcatttataccaaactgccaataaggtccattgtcaactgatggatagagtatttaaggctttacttatttctggacaaagtgttttgttactataacaaaagtaaccagtgaggaatttgcatttaattttctgtccaacgcttattatgcatgcaactctatgtttatatagcaccaaaccaccaatgttaattgaagaattaatatcgattctaagtggatgcctgtttcctcatttactttattcattacaaacgttgattgaagaatttctgtaaatactgaatttttattcccttttctgtg

SEQ ID NO: 10073 - DNA, 515 bp, Zea mays
tgtcacctgggagctctgggtatcacgggatgcactcgatcagccactcgaggctctgcatgaaacagattgcatagaataatggatgtaaggttagcagacctgcaaactgtagcatgcatgaatcatgattcatggcaaccagtgtctttctaaaaacaaaagagaaaaaaagaagaggagaagcgtaccattaggcattctggtagatcatcgtcctgcgtcctcatgtgagtctgcatatatgtaaagagctactcattaggcatttccagtctaactcgaatctgagcatgtaaatttggagtctgatatctgttttgaagctaaccgacttgagcttctgctagttacagttcatactttgatttatatatgcataccaagttctaaacaatagcaaatctgacaaaatttataacgagaaatgcaggacttggggggtgttcacctccatcaccaaatggcatgagggctccttgcctgtggcaaggcaagcaagagctaccactgca

SEQ ID NO: 10074 - DNA, 1016 bp, Zea mays
taccttgcaagccttgccaggtcgacttagaggattcccctgcatgtctagaggtagaagtgagtagactcctcacaccgggtaagtctagcctgagtattagtatactcagccttgcttgtggcataatttttacaggttctctggaggagatggttgctgggataacttggccgaccaccctgccaccgggttggactgtcgagtgggaccctgcctcgactgaggaggagcatgaggagtgatgggacaggcttccccatctctccgtttaattatcgttagttttattccgctgcacttcgaacattgatgattacttttgcaaaactccgatgataatgatggtgatgtaataatttaactttgcgacatgtatggttttatgctttattgtatttgctctgtgactcaccttcgagtgagattgtggtacttgatcctgtcagtggccatgtcggactagatccgagggattgacgggttattcccatttaagtgtggtctagcctctaaggcgggacttgggcacttaagttggaataattcgggcagttccgccacagccttgacaaagcagcggtggacaccggaaggaccggtggctggattctctgcagcataacccaggtggaggagactaagatcattctccggatggtgcccatcttcctgagtgctgtcctaggctacatcccggtgcctctcatcctcaatttcaccgtgcagcagggcaacacaatggacaccaggcttggcgcacttcacatctcacccgcgacgctattcatcatccctacgcttttccagatggtgatcctcgttgtttacgaccggttcattgtcccgttcctaagacggataaccgggtacgtgggcggtgtcacgcacctccagcgcatcggcatcggattcctttcaaccatagtggccaccggcgttgcagcaatagtggaggccagtaggaaaaaggtggcacgagacagttgcactgtggatgctacaggggtaccgag

SEQ ID NO: 10075 - DNA, 593 bp, Zea mays
gtacccctgaaagtatttgaagtttgatccattgtctatttcttttctgtgttcactgcatcgagagtttagttcgttgttttcttttttccgtgtgactctgttctcttcattcgattcacactgttgttaattatcagccagtcagagagtctcaaactctccatgccgtttcaaaacatttgatggcaactaagctcctcttaattcgactgctacccagaaactgtaaagagatggggtgtggcccatcgatccccgacaagtacacgataggtgggaaggggcgcaagcgccggagcgtcatacaggaggttgccgtgttcgtgcccaccatccgcatcccagtggcctctgacatagctcatccactcaggggaatagtttccaaggatcttgtcgaccgactctccacactccgtgcccatgtcgcctcgctggctgaagaaatctgtatgttcatctttgatctgtcgttgctactgctcagctctgctctgctcgccgcctgagcttggttattgtaaaaggttctgatttactgttttgaaattggcggccctatgctatgcgaagatcacgcggacgtatca

SEQ ID NO: 10076 - DNA, 504 bp, Zea mays
tgcggccattggtactgccctgtagcaggcccgctttgctgcccgcacaatgtcatcgacctgcaagcaagcacagccgtataaccaacaataacaaaatcaatggggctaaagtaatagtaatacatggcagcaaatcagggaagtttgcaatgtatgcacatatgtgttcatgcagacatgtttaaaaagtaaggtatagcattgtagcaaaaaaaattatattagttgtccatgagcaacccaaaaaatgctcctcaattatctcccgaatgagtcattccactaccaaacaagatacacacccaattcttactagtttccagtcttctgcatagcatcaagcattacagccaagctaccaacctataataccgacattatgctgtgtgaccactttgaccacaatccacaatggctacctggtacgcacaagcacaactggacagacaaagaaaccaccatactcctaaacatggcaggacaatcctccaggtatatcca

SEQ ID NO: 10077 - DNA, 665 bp, Zea mays
tgctcatgggctgtcgctcactatctcttaccttccagaatcgaatggtagtacctgcttaatcttgcttacgtacgtatactttacattctataatctactggcaggattacattttgaagaagaaaaactctacaacatatgggagatgaaagaagaataaactgtagcgcttacatgcatgctcaaaatagcctcataaacctaatactatctgggatgctagtccagctcctcccatttctgacgtgaatttctggaccgcgtgaagctgtctacttctcttcagatcccgtgccgtttgtctccggaccatcactcctcacagcttgtgctgcattgctcctgtctataataatctgtcacaccaaaactgcaggctttaaaaggcccagacgcattccgggcgcctctacagcccaattaaaaacctcatttcttctctccaggaaagagggattctatttcaggacgaacggccacagatgcatggatgcatgcacatgatcagctaccagggctcggactcgggctaagacccgaaagacgacgaaactccgcctcgcccgaccccagggctcggactccgccctggcctcggccaaacgatctccgcctcgcccgacccgggggctcgggctcggcctcggcaacggaagacagac

SEQ ID NO: 10078 - DNA, 494 bp, Zea mays
tggtactctgtagtctgtactcctcccgatatgatgctcggttacaaagtacatcaaacacagagaagaccccttcggtcgaaggagaaaaatcagaggcgttggtcagcaacaatataactatttttccgatgattatagatcgcagtagatttactataaggtgtcgatctcccagcgacagacctccgctttacttgccaagttagtcgctttctttagaatttagatcacaaactcaacatgccccgaataacggaccagactcttcttcagtcgtcgcctcagctcctctccgtcttccaacttttctgctttaccgccctatataaccctcggtcggcaggccgcatgcaccaaccaacacaacacgaactagaactaggcgtggctcaccgttcgagatggccgcggcagtgactcgccgggtcggtctccacgtcgaggcgaccaatggcggcgccgacgacgagagcaggcgcaatagctcggca

SEQ ID NO: 10079 - DNA, 509 bp, Zea mays; identical to SEQ ID NO: 8794

SEQ ID NO: 10080 - DNA, 547 bp, Zea mays
  unsure (1)..(547): unsure at all n locations
tgacactagttcgagctcggtacccctgctagtgctaggccggcggcggtgtgcatgcgtggtcgagctcgatcgagcaggtaganncctgggatttattaatacgtagtacgttacgtacgtacgccgtacgcgcgtcggtggatagagacagtgagacacgcatgcaggtagatctgtacaggagccaggatagagatggtgacatgatgcatggagagatccactcccatgcatgagcacaccaccgcctactatactatacgttcagttatgcttgctactagtagaaaaccctgcacgagccactcgtgcgtgcctgaataataagcagacgacgtacgtgtttcgacaacttcaattcgatccaccaggaagacaggtgcgcgtgtttagttttctcaccgcgcgcaatttgcacaacagctcaacttctgggtttcgacaatttcatcccgccgttcgccgcaacgagcggggaccagctcctgggcggcgccaacttcgcctccgcggccgccggcatccgcgccgagaccggccagca

SEQ ID NO: 10081 - DNA, 489 bp, Zea mays
ctggccagcgaaggcaacgacgaccttgtgcacatttgggatgtgttgatggcatcgtccctgccatctgcgggccacaaccagtggctgcataggctcgaggaccacgtggccgccgtgaaggcactcgcgtggtggcagcgatcggtgcatcaaattctggcacacacacactggtgggtgcctgaactcagttgacacgggatcataggtgtgcgctcttctctggaacaagaatgagagggagctgctgagttctcatggattcacacagaaccaactgactttgtggaagtacccatcgatggtgaagatgactgaacttactggccatacctctcgtgtccttttcatggctctggtgaattattctaacaagttaacagatactatctgcactgagtacatgcgctatgctagtgtgaacattgtttatatagttcttgcatggtgaaactgcagagccctgatggatgcacagtagcgtca

SEQ ID NO: 10082 - DNA, 434 bp, Zea mays
tgtatggactggttgcgccatttctaattcgtttcccatttaaatttcttttttcttaaaaaaaccacagtacacccggccatcagggcaatttaagtcatcaactaccttaattaattggtgggggggggttaggtttcatgttatggatgtcaataattggcaattgttttatcagttttgtcgggtcaatcttttgcgctcgtttcactactcactcattcactcgctcaataagttaaacggcaccactactcaaaatttaagggccggtggccagaataattctaaggtggaatgattcactaatttgtataactttaataagtcggaacagttcttatcttcaatcctggctaaccgaacacgcactaaacaggcgcgggatcctttccgccccaagggctgatttggtgtgccgggatcacggggaa

SEQ ID NO: 10083 - DNA, 478 bp, Zea mays
tgtacaatgataagagacattgtcctcagcacaagcaagaccaggtaaccattccaatgctccagtcacaggagatattaaaatgcttcacataagggttggccccagcatagagtccatttgcaggtgcacccatggcaataaaaaaacagattgaaaattacgcctagcagcaagcacttactcaatgttcatgagaagagattactatgatgtccaagtttcaacaattcaatagtaagagcaactccaaaaagactagtcagatcgttttgtaaaactaaatttggctactattagaagaaaaacaattctaatagactttgtaaatgcctctttaaatttagtagctcttcatccctccaatttcgctctctatttttggatagtatgcttcactcgccatctctattgttggtttgcagagtctgttggattagtctactcttttttaaaaaaaaatctattttagacacca

SEQ ID NO: 10084 - DNA, 528 bp, Zea mays
tgagcttcctcagcctggcacacaacagcctgaccggggacatacctagcgccattgcttccttgcaaaacctccaggtcctcgagctgtcggggaaccagctctcggggcagatcccgtcctcactcttcaacatgtccagcctgctaggcctgtacctctcccggaaccacctctcggggccggtgccaggcaaccagagctttaactttaacctccctttgctggaacgcgtgtacctcagcaaaaacgagctcaccggcacggtgccgccaggctttgggacgtgcaagtacctgcagcagctcgttctgccatacaaccgcttcaccggcgggataccgccgtggctgtcaaccctgccggagctgacatggatctccctaggtggcaacgacctctccggcgagatccccgccgtcctgagcaacattaccggcctcaccgtactagacttcaccacgagcaggctgcatggggagatcccgccggagctgggccgcttggcgcaggggtaccgagctcgaa

SEQ ID NO: 10085 - DNA, 539 bp, Zea mays
gctcctttgcagcaagaggcagccgtcggatcgaccgaccatgcacgaggtcgcgcgcgtcctggacagcctcgtctgcccagcaggcccgcccccgaagcaggcgcaggcgcaggcgcaggcacaggcgtcggagaagccgtccaccacggcgccgagctatgtcagcgagtacgtcggcctacgaggcggaggcggcggcggcagcgccctctcctgcaccaactcgtcgagcgcgtccgacgccgagctcttcatgaagtttggcgaggtgatctcgcggagcacggaatagtccaatagatcgacgatcattttgtgttacaacttacagtttacaataggtgtctggccggcgccctgtgatgtgactcgctgtaaatatgctgctgccttctcgttgggactccactaggcactagtagctatttttctccgttatgcacgtctctctctttttttttgctgggaaactcgaactgtaactaaaggaatggatttatgtgcaggctgcgtttactgacatgttttgtgattca

SEQ ID NO: 10086 - DNA, 544 bp, Zea mays
tggagggggtaaatctttgaaagtctcggtgacacaccgcctgtattgctgctgaggcttgaacattgcagtttctggcaccttcgatttcttgcagtagttctcggatggggagccacacagcttaaatatcttgtggatttgctccacctggcaatggcaacgatttcgggctcattatattaattggcgatcgatgtctggaagcaaaaaacgacaagaagtatcaataatcaaattagaactacctcggttcttcctggcatgattggcttgccagcaaacaactcagccacgatacatcctgtgctccacatgtccaccgcagcagcataatctgtggcacccagcagaagctccggtggtctgtaccataacgtcacaacgcggcttgtcagtggctgcgggttgctgggatcgtacgatattgccaggccgaagtctccgatcttgagcgtcccgttgctgtcaatcaacaggttcgagcccttgatgtccctatgcaggaccccgtttctgtggcaatggtcgaggccgtggagca

SEQ ID NO: 10087 - DNA, 467 bp, Zea mays
tgcttcagatccagcgttaccaggttccgagctcgcatcctcttctttcgaatttggactacctttggatttcgggggtttcttcgattgacgcggtgaggtgtctgattcgggcgcgaattggaggatttgagggctgcgctgttggattcgtgcgcggttggtggttcgtattggtgttaagattcccgtttaggattagggttttggagaggatattgttatttttttttgccttttgtgctttatttctgttgcttctgtagcttgaatttggtgtgtgccactgaaaatggttgtaaatgctgaacagatctgtgacccgctggcgcctgggcacatgacaccgacggttttaatggagtttgggcagcagaggccaatgaaacggggatacgaggaaatggtcttcagggcagcctcttcccgtggttatgcagagactgttggcgagtcgggagttgcag

SEQ ID NO: 10088 - DNA, 513 bp, Zea mays
tcgagctcggtacccctgtaatgcaacgtgccaaatttgcattcccttttacaccacggaacgtaggaaacggaaacatttttttcccgaacagaataaatataaaacaatggtagaaagcgtaacctgagtcattcagcgctgatcagcccataaagtaaacacgcctttgtgcgagggcgagtccaagctccaaagtccataccaaacatgccggtttgactttgtgcgaggagcagatgggctgggcattggctgctaccagccctcaaccgcaggcccttgtttttgggctagtccaactttcttttaaatgtgcgtttgggccagattgttagcggagcaaagtggagtgcccagtaggcccgcatcagaagaaatggccttgttttgctgggccacagcttgcacgtgcagcccatgcacggaacggatgcacatgcacctgagcacagcactcgcttcacatcaactccggtaaatgagctctgcggtaagtcgaaaacatgaaca

SEQ ID NO: 10089 - DNA, 574 bp, Zea mays
tgatatgtacattacataacactgtctatttatttatttattttcttgtcatacaagttttgcaggccatattcttatgacccctttaatgcataaactttagaagatcaacagaagcatatacttgttaaatgtatgcaatattgatggtgcaccctttaattttaccataattgcataatgatcgttacatgttattgaattttgttaatgaattgagtctctctgttctttctgaaggcttataggttatcatgcaagtagtagcgtagtttgaaagtatatgttgaatttaggtaatcattgctaatccctgttctgtaggttgagctggaggaccctgtggaaaacattggagctaaattggtcaggcaagctgcagctaagaccaacgatcttgctggagatgggacaaccacctctgtggtccttgctcaggggctgattgctgagggtgttaaggtgtgccactagctgaaatttgttgctacttgtatatttgagtgatcaagtattgtgttttcagctaaatactgtcttgtccaggtcgtagcaggggtaccgagctcgaata

SEQ ID NO: 10090 - DNA, 489 bp, Zea mays
tgcagactatgtggagcaagaatcgtcagacgacaaagacactgcattcgacatagctgcttggcacgggtcccaaattgaggctgctccaatccttacagagtggtacctatttctttactaaaattagagatttcaattcaatgctttatgtctagttttgtgcatcctaatgttctaacttgtgaatagggaaactctatgctcgtatttgttgttgaacttgagcgtatctcacagagaacttcagacagtactatgctttcgttactatcagtgagtatcaatgtttaaaagaaaacttgtttatttgtatgttctaacatatgtctgtaactcatatttcaattacagagggtatcacgtcgtcttcgtcgtgcagcggctcgttgtggatgccggtctctagcgagcgttgacgtgcaactgcctgtgcctcctatgcagccgaacgttcaacgtcccatttgtgtagttggaccatctaca

SEQ ID NO: 10091 - DNA, 475 bp, Zea mays
tgcagactacgccgagcaagaatcgtcagacgacgaagacacagctttcgacatagctgctcggcacgggtcccaaattgaggctgctccaatccttgatagagtggtaactatttctttactaaaattagagatttcaattcaatgctttatgtctagttttgagcatcctaatgttttaacttctgaatagggaaactctatgctcgtatctgttgttgaactcgagtgtatctcacagagaacttcagatactactacactatcgttactatcagtgagtatcaatgtctaaaagaaaacttgtttatttgtatgttgtaacatatgtctttaactaatatttcgattacagagggtatcacgtcgtcttcgtcgtgcagcggctcggtgtggatgccggtctctagcgggcgttgacgtgcagctgcctgtgcctcgtatgcagcaagacgttcagcctcccatttgtgca

SEQ ID NO: 10092 - DNA, 488 bp, Zea mays
tggatgaaaaatctcgcggcatggaatggaaaagatctttctttctttctttcttctttctttaccccaagggcagagacgccagacaggaggacgattgttctgccagcctttttttttatcttcttcttggaacgtaatggtgacaacaaataggtaacgacacctacctgctaggcttccctcactctctctcgctctccagcagggatggcttctgtggaacccgtgacaacgacctcgatccacgcgagcgttcgcgtgttctttctcctcctcccccctcccccctcgtttcacatggtcataatatagtggacgagaagatattaatcggaccgggacggacatgtttggggagggaaaccgtcgtcgcggtcgcgggccgggtggatgggcgacggcgacggcgcgcccccggggataacgtagattattaacaaacaaaaggctccccgtccgccctgggtccgtccgggacgggagca

SEQ ID NO: 10093 - DNA, 522 bp, Zea mays
tgttgatgatataaatgatatggcagactcagttgcgtcatgtttaaatattttgttgggaccatttctggaggaaaacaatgacaaagattgtggtgaggatcataatctcaggaaaaggtggctggaggtctttttgataaagagatttggttggaagtggaaagatgaatattgtcttgatctaagaaaatatgccattctccgtggtctctgccataaggtaatttggtgctataattttacatttcattgaggtttaacatttttattgtatctgttcaatctggaaccacgattcagataacaactcctccaatctaggtaggacttgagttaataacaaaagattatgacatggatatgccacacccattcagaaagtcggatattatcagtgttgttcctatctacaaggtaaccttttcatttctaaaagaaatagctgaataataaattcttagagaattcatggacatcaacctttattttgcctacttgcagcatgttgcatgctcatca

SEQ ID NO: 10094 - DNA, 514 bp, Zea mays
tgaaggtgtacgtgtacgaggaaggcgagccgccggtgttccacgacgggccgtgccgcagcatatactcgacggagggcaggttcatccactccatggagacggagacggaggagggccggcggctgcggacccgggacccggcccgcgcccacgtcttcttcctcccgttcagcgtcgtcaagatggtgcagacgatctacgagcccggatcgcgcgacatggccccgctcaagcgcaccgtcgccgactacgtccgcgtgctctcctccaagtacccctactggaaccgcagcctcggcgcggaccacttcatgctctcctgccatgactgggtgggtagtaaataaagctctccatggtccatgctttgcgcgacagacatgatccatcatctcgctctcgtcgagctgccacagccacagccatgacttcttgttggcttgttgcctctaattctctgtacgtactgtcgtcgtcatcagggcccgtacgtgtcgtcggcgaacgcgca

SEQ ID NO: 10095 - DNA, 490 bp, Zea mays
tgtgtagagtgaaaatgtgaaatactgtctacttgaatagttgaatacacaaaggagactatagtaagattatcagtataagatctgtcgtcggcgcgcttaatttgcttatgaaatagaggctagctagctggatggtctgtatgtagatcagttctagattagtaatagtagtgatgcattattatttattgaccaccgtcatctgctgctctctctccgactccaaatgaagcgccaacccagtccaagaagccgaagctgaagggatcgggacccagcagcaactgcgtgccttcttcctccggcagcttctccaactgctgagcagtggcctgctgttgctgcttttttggatggaaatcgggggcgcacagaacgtcgagggcgccgtccatgtccgcaaacatgccgaagcccaagtcatggtcagcagcagcgtcctccgcgggcttggaattatccatgtcgaccacctcctgcttgagca

SEQ ID NO: 10096 - DNA, 997 bp, Zea mays
tggatgaaatgccatatcgtggtatgcagattcaatttatgtatgcttggacgtctcgtggaacttgatgatgtagtttgctctcgtgataagtttgttatcacactgtgtcactgttaattatggtgtacatgacatcttggagttaccattcctgctatttgcaaattgctggtacaattttaaatttttttattagacaaaaagaatagaaactgcatgaaaacaagtcttagtggcgaatagtacctcatctcaaacaagtggtttaaattgatactttagttttctaatagttgtattctctgttgctgttttgcgtttcatatcatggtattttcagctaaagtaccaggacagaccaatgttcccaaaagatgtactaccaatagacctgcaataggagggccatttaagctgtatgatacagaaaacaatgaggtgactgaatcaaagcttcggggaaagtggaatctgatgtactttggctatacatcatgcccagatgtgggtccagctgaagtctaagtagctgtccccaccctataaagcttgtgaaatggtatgtatcgtctaccttatatttgtgatgctagagagattgtatatgtagatggatgagctcagttagaataatataccagtagacttcaagataactgtattagagtcaagggtgtctaaagtctaaactgggtctacttggatgccggtaatgggctatattattagaggcagggatgggctgattgaacaaacatttttgggattattagattatacacctcataggcagcctacgggatcaattattcatatacaagtgtagttaagtgtactgtacaatgatacatcgatcaactctgaacatatggcatcaatatgtattaggcatttctctattcgtcaaatgaaatggtacagttgtaaattatatatctaatgaagaaaggaactgagttttgcctgattgtttttaactttgtatctaaataca

SEQ ID NO: 10097 - DNA, 568 bp, Zea mays; identical to SEQ ID NO: 252

SEQ ID NO: 10098 - DNA, 475 bp, Zea mays
tgcttccgcttcccgcgcggcaacggcgtgggcgccgcgctcccgccggggaacaagggcacggcgctggaggtgggcaggggcagggtgctggtgggcggcggcacgcgggtggcgctcctcgggtacggcgccatggtgcaggcgtgcctcaaggcagcggaggcgctgaaggagcacgacgtgtacgtgacggtggccgacgcccggttctgcaagccgctggacacggcgctgatccgggagctcgccgccgagcacgaggtgctgatcaccgccgaggagggatccatcggcgggttcggctcccacgtcgcccactacctcagcctgaccggcctcctggacgggcccctcaaagtaagcacgctactcctagtcctagctagtcaacgtcactgaaaattattatcgttgggcgttggctggcggctaaccatgccatgcatgtccatgtacggctaattaatttgca

SEQ ID NO: 10099 - DNA, 487 bp, Zea mays
tgaggaacacagacacagacacagggcccccatgcaggctgcattgtcttggtcgcattaggacacgagattaagggaagggtgggtcttggatatgacaggatgcatcgccggccggccgcctgacgacgaatgctgatgggacgacgctgcgcgcgctgctcgatggatggacccggagctcatcgatcgatcgatcggtttgctcaagctcaacccgacccacggcgaacgggtgaattccggcgatgcatcagcagagcacagcgctgtcggtggattgatagacatgttgagtaaattgttcgtctctctgttagtttaagctgcttgagtccaaaacggaggcaggaatgccggcgttggaaggagacaagcaggtcggactcgagctcttggcaccgaggaccgccggcgacgacggtgaaaagggagtccacgcgtttacgatagatgccgtcaagcgcgctcggcactggccatcgcc

SEQ ID NO: 10100 - DNA, 601 bp, Zea mays
tataatgaaattcttgatttgattttcaaccaaactggcaatctgatgctgcctcagcaattgctgctgctgtgatacaatgcagaacttctagtgggaagcggcgaaacatcgggacaaggggcgacatatggctcctgttcgttggtcctgaccaggcaggcaagaggaagatggcgaatgcgttgtctgagcagatggtaaatgctgaaccagtggttataaactttggtggcgactcccgctggggcaaggatggtaatggacggcctaatccaggtttctgggggaaaacctcgctggaccgggtcactgaggcagtccggcagaatccatgttcagtgatcgttctcgtgggcatcgatcaggtggacgccgttgtgcggggaaaaatcaaccgggcaatggatacgggccgcctgccggactcccggggccgtgaggtcagcctcggcaatgtcatcttcgttctcacaacggattggttgcccgaggaactcaggaggccgaagtttgacacaccgctccaagacgaaggaaagatgctcgagaaagcacactcggattggcagctagagctttctatcggggacaagcagca

SEQ ID NO: 10101 - DNA, 509 bp, Zea mays
tgccctgctatttcttttctggtcactgctgcctgtaatgggaatatttgtctcatccttttgtatgaagaatctctgttgattttttgcttacttgagacaatcctatagtgtttttttttcttttgccgatagatttaacttaaattgtctatatttttaggaccaatactggccacctgctgattttcagcgcctgctatctacaaaactgaaggcattggttaattccggaaaattaatcaaggtctctccctccctccttccctgggttgtccttttaggaataatagtggggacagacttcaagctgcatactatttgaatcatgattataggtaaaccaaaagtacagaattgcaccaagtccacccccctcgggcagaataggcactaaggtatcctctgctgaaggcatgaaggcagaaaataataatgctaaacggctaactaagcatcaagtgattgctgagctggagaagatgaaaggcatgaccaaggaagaggca

SEQ ID NO: 10102 - DNA, 450 bp, Zea mays
ccaaggtcgattgcagatgtcctgattcctgaagttgcttcatattgaaggatatcgtttgaactcattatctcaataataatcaaaggcttgctcttgtagataaatgtatcattagagtatcatggctggcccacatattactttcaagaacgtcttggaaaatgttcagatatgcacacttgctgaagtttaagcatttctgaggtagcaaattctttggaagaaaatcagatacccaccttggctcaaataatcctttatgcagttggaagtgtgttacttcggtgctagaaaactcagtgcttgttcttttttaatcttcaaactgctaattatatatttactactacttttacagtgtggaaggatagcaagcttcaactgcaagaacggaatcgacttggagcaggtaacctggccagaaatgggtgttcatggagcaaggca

SEQ ID NO: 10103 - DNA, 470 bp, Zea mays
ctgcttgagctgtacgtacgttgcgtgttccgcgcgcgcagcagcctgtagccctgtactgcgccgcacagcgcgcagaggcatatgcttcctctcttctctgcccgggcgccgccggccggccgggagctatatataaattgcaccaccaccacccgcagccattgaagcaaagcaaagcataaaagattgtatagcttgagtcgtcgagcgaaacagctagcaaggaattccgcaagcaaggatgagtaagccggctgcggccctagtgatgttgctggcgctcgtcgccgccgggccggcggcgggcgacggggggagcaccagactcggctgcttcgtgggttggtccccgctcaaaaccgtgtcctccctgctctgcctgctccagggctccagcactttcccgagcccgaagcctgcgcccacggggcagggcctgagcgtcggttactacaacaaaagcggca

SEQ ID NO: 10104 - DNA, 500 bp, Zea mays
tgttggtaaatttccttcctccgtcaagctgtcaagcacaatccttgccgaaccggatcccgaaggatcatctgcaatcgatccggggacagttttcacaccaatagccatcttcggctcgcgaactttatctttagaaattttcggtgcggcaggtggcaccatctttgcaggtctaagaacaacctctaacacattggtcattctttttccccttctaggagtccctgctgggctagatattgccttcgattgatcttgcaccttcatttgttcttctgtcttcggaaattcttttgctcccgattccataacaacaacaagtgttttagcaaatataatggtttcgctttccttcacttgcttattataaattccagagaaatattagaacattaaaaaatgagttaaaagttaaagaaaaatcaaaattcgttaccttaggaggcgcaacacccacttcaactatatcgtcagattttgttttgtcaccttcagca

SEQ ID NO: 10105 - DNA, 498 bp, Zea mays
tgagtagggcttagcaacattagtaagatctgagttgttatgtgcagtttttcctagctctgttagctagcatcctggaagctgttaatctatgatgagtctctggagtttttgtttccattgaacttgctacatctgttgcttatctgctatctttttggctgttgacctgttgtgaaattcaatcccttgcataagcaatcatcttctgcatcaaacatgtaaggccttcttcggttattcccatcctatgtggattggatgagattgaacagaattaggaaggattttaacttgtttgagatttaatcccacccaatccactccaatccacatggattgggtataaaacgaacaggccctaaaagggttgacatggttccctaaacattcttgagagttgcaaccaagttctgctacttagttctgagtgttcacttgttgttttccccaatgcaggagactattgttcattcttcaggggtaccgagctggaat

SEQ ID NO: 10106 - DNA, 490 bp, Zea mays
tgaaattgtatcatagtccagactatttgcagtagcaaactcagcaaaggttgcagaataccgcttgaagccagtcatccaagtgattgactgctcatcaatgtcaatctcagcagttgccaggaattgtttcacaaccatctcactgaagtctgtcttctggcccataaagtgatagagaccacatgcctcgaactttggaatcaatccctccatgactgattgacccagcataaaagtccaatcaataacttgatgcttgtgaaagtttgtatccattagggttccccagaagacatcaaactgaagctgagtatgaaaaaattgaatattggtgtgtgagggcagatcatactgattaactgtcctcctagagcagtactcagccatagagaatcgcctctttggataagtccatcctgtgatgtcaattggataatcgggatgagcgtgtggaacatcttctgtgtccatagaaatgctacctcca

SEQ ID NO: 10107 - DNA, 499 bp, Zea mays
atggtgccataatccagactgttggcagtggcaaagtcagcaaaagatgcagaatagcgcttgaatccagtcatccaggtgatggattcttcttctatatcaatctctgaggtggccaggaattgcttgacagccatttcactgaagtctgttcgttgccccataaactgatacagtccacacgtctcaaacttagggatcagaccctccatgactgattgtcctagcatgaaagcccaatcaatcacttgatgtttatgaaaatttgtatccaccaaggtgccccaaaaaacatcaaactggagctgagtgtggaaaaattgaatattggtgtcagatggcagagtgtattggttcacagtccgccttgagcagtactcagccatagaaaacctccgctttggatatgtccatcctgtggtgtcaattggatagtcgggatgtacatgaggaaagtcttctgtgtccatagattcagtgcccacaggggtaccgggct

SEQ ID NO: 10108 - DNA, 490 bp, Zea mays
tgggggcactgtatctatggacacagaagacgttccgcatactcatcctgactatccgattgacatcacaggatggacatttccaaagaggaggttctctatggcagaatactgctctaggaggactgtcaatcaatatactctgccatcagacacctatgttcaattctttcacactcagctccaatttgatattttttggggcacattgatggataccaactttcacaaacatcaggtgattgattggacttttatgctgggacaatcagttatggaggacctgattccaaagtttgagacatgtggtctgtatcactttatgggtcagaggactgatttcagtgagatggcagtaaagcaattcctgaccatagctgagattgatatagaagaggaatccatcacttggatgactgggttcaagaggtattctgcaacatttgctgaatttgcagctgccaacagtctgaattatggtaccatttca

SEQ ID NO: 10109 - DNA, 927 bp, Zea mays
aactttttcctaacaaaagggttaaggcttttggggttggtatagaaaactttaaaaactccgagagttaaattttttaaagattgggacaacaaaccttaggggttaagggttttgcgggtttcggctttttttcttggggctaaaagcaattgtttagaatgccccatatggggtggaatacccgccaatgggtgagggaaaaattcggcttagggcgccattggccatcaggttgagccaattgttggaagggccgatcggtccgggcctttttggtatttagccaaagtggcgaaaagggggatttgcttccatgggcgattaaggttgggtaacggcccagggtttttcccaagttcacgacggttgtataaccgacgggccagttgcaaaggcttggcatgcctggcaggtgggactctagaggatccccctgaaatgacgccataattcagactgttggcagcagcaaaattagcaaatgttgcagaatacctcttgaatcctgtcatccaagtgatggattcctcttctatatcaatctcagctgtggccaggaattgcttgactgccatctcactgaagtcagttctctgacccataaactgatacagaccacatgtctcaaacttaggaatcagatcctccataactgattgtcctagcatgaaggaccaatcaatcacctgatgtttatgaaagttggtatccatcaatgtgccccaaaaaacatcaaattggagctgagtgtggaagaattgaacattggtgtctgatggcagagtatattgattcacagttctccttgagcagtatttagccatagaaaacctcctctttggaaatgtccatcctgtgatgtcaattgggtagtcaggatgtatatgaggaatgtcttctgtgtccatagattcactgccccca

SEQ ID NO: 10110 - DNA, 487 bp, Zea mays
tgatgatgcctcgtttccgacgctgagtgctccagttgatgcgccagctctccctgttacttcggttgtagggctggcggcgcctggacctgcctcgtttcctgcgatggaggggccagctaatgtgtcaatgctattggatgcttcgggtgttgtgccagcggcgtctggccctgttctcgttgctgttaatgctgcggattatccccatgaagactgttcggagtcccaagaatctgcttctgcgcctattcaagagaagtgcggccatttatgctcggcggctggcagaccagttattgtcccaattgatgttggggttaatgcgttggtggcacctgctaaatcctcggtttcttccttaatgacggtggatgactcgttttcgaggttggggggaccagttgatgcgccagctctccctgatgcttcggttgtagagctggtggcgcctgggactacctcgtttcctgctgagggattgtca

SEQ ID NO: 10111 - DNA, 551 bp, Zea mays
tgcatgcctgcatcgccgatccaaggggaataatttaaataaaatgaaaaggtgaagctccgctgatgtgtgctgggcaatggacaggggatgaacgggtcgtcgccgccgcgcccggtgccgtcagccgacggctgcggccaagagggtggcgggccgttctcacccaaggtcggccgctacagcgccgaggagaggaaagagaggatcgagcgctaccgtgtcaaacggcaccagagaaacttcaacaagaagatcactgtaattgatcgcatctccctccccctacaaatgatcgattatttgctctctttctctccgaacatccattatgttcgtgtcagctaacgttcgaccacacgcgcagtacgcctgcaggaagacgctggcggacagccgcccgcgggtgaagggccggttcgcgaggaacggcgagaccgacacggaggccgaggaacgcgaggcgtccgacaacagctacggctacgactacggctgcggccacaacgagctgagcaacggcaacggcaacaccacctacagcgcgggca

SEQ ID NO: 10112 - DNA, 476 bp, Zea mays
aacgagatatgtgcctttgccatcaagaacctaccgaaatgaaggggccattaactgcagaatgaggccaaagcttttctggtggttgcaccaccaacatctccgtggcgcaaaatgggatgccaatccaagtcccccagcctcatgaacagaacagcgcgctgaaaaaaattgcagccgacaagaggccgcgatcagagtaccatctctctctctctctctctctctctctctctctcagcattattattattagtgatctaaatgcgctacctcatccatcactaatcttaatccggctcgcctaaccacaccatgatcaacgaacagtgtcactgacacatcgcaaccaacaggaagccgcgatcagagtagagagtaccatatctccgaccattagtggtctaaatgccctgcctcatccatcattaatcttaatccggcttgcctaatcgcccccacatgatcgatgaaca

SEQ ID NO: 10113 - DNA, 508 bp, Zea mays
cctaatcctagctcggtacccctgtcggtgcagagcgaccgggacggcgcgtaccactacagcctcggcagggcgctggcgccgctgcgggaggagggcgtcctcgtcctcggctccggcagcgccacgcacaacctgcgcaagatggggccgttcgacgcgcccgtgccgcagtgggccgccgagttcgacgcctggctcaaggactcgctcctcgacggaaggtaaactgaactgctgagacgccctgctgctgctggcctgctgcttctttagtgcttatccgtccgctggccttgtcaggtacgaggacgtgaaccggttcgaggagaaagcgccgcacgggagggtggcgcacccgtggccggaccacttctacccgctgcacgtcgcgctcggcgccgccggggacggcgcaaaggcggagcagatccaccagtgctggaccaacgccacgctctcctacgcgtcctacaggttcaccaccaagagctgacgcgcccgtgca

SEQ ID NO: 10114 - DNA, 467 bp, Zea mays
tgcttgtagacacacaaaaggttcccagtcctgagtaacaataacttcactcctatgaatcaagaatctttttgtgcttcgacttaaggacatagagatgaaacttacaatcttttttaccgctaactaaagatgagtatacaaaattattttttgtggaaaatctaatcctactgttttcacctgaccaattaaaacatttgaaatatactccctccgttcttttttatttatcgtgttttagttcaaaaatgaactagcaggcgacaaatattcgagaacggaggtagtacatgtttgtgcacaaattgatacctcaaacttccacttatagctcagattggcctcccaacaggacgtgtgtgtgggtggcttatgaagacatacagttctccagtatgttcaagaatagaaatggctcctcgaaatttaaaaaggaaagttggttcctgtatcttgggaaatgg

SEQ ID NO: 10115 - DNA, 562 bp, Zea mays
tgtggaccggaccattttatttgtctttgtctttcctttccctcatatacacacacacacacacacaaacatagtccttcctatattctagctagcatcttgttgcaaaccatatactcctactatgcattcgcggtgtacggacctgcatatataatggactctctttttttaagggcaggcaatggcagttatggctgtttttttttataaaagagagagagagagagagagggttcaattaaactgtcacaacattccaaatttcagcctgatgcgacgacgacgacaacaacaacaacaaaaaagtggagcacaatgaagagcagcatgtgcattgcttggatagctccatccatccacagttccattccaagagtttttgtcaccattgcttgccttgctgtacattgaggttccatccatcctggtagtagtctttacttatatcatcatgctgattgtcagtgacattggtaccttctttggatgtagtatcatggatgggggaggggcgtaagataagagagaaagaaagaaagaaagcatgctagtgctagca

SEQ ID NO: 10116 - DNA, 506 bp, Zea mays
tgcggaaatggaacagcaatggctacttccctcctagtttgaaaatatggaaagctagtgagaagcaggacgattccattctattgactgatgctttggcagggaagtttgagaaagaccttcctccatgggaaccgccacatgttagtttgtttcaaattaacaaaacccctcttgagcaaagcacaatagctggtgaacaaactccaaaatcagtagttgcaaagtctttctctagtagtaatcaaagacatggttatagttcaacaaaccttggaacaaccatgatccattctggcacacaaggttattatggaatgcaaaattctcatgcagcatacacaagccaacattctcttactggaagttggaatgccacgtcaagtcagtttggggttgcggtaaatcctgtgacacctactcagcctgccatggggagcttttcaggacaaaacatagtgtctgcagaaaatatgggtcatctaactcctggaacggctcctgca

SEQ ID NO: 10117 - DNA, 529 bp, Zea mays
tgatccttgagctctgtaagattacccaaaatctgataaatggagttgttcaacataaagttgaatagggggtctgtgttcacccatgtaaaaccagactgtgcaggaattactgtaattcctccagggaatctcaatagctcgaaagaagatgggtgcccaaacagtgatggtgttaaggataggttcacctgctggagcatcatctctattaaggatgatctcagcacacttagagccggtaaacttattgaagcatcttttggataaggaagaacaccaaaaacgatatgtgtaaagtatttagaggttaaggggtgcattgaaacaatggaaacctgcagaaaacatattctaatcagcaaacactacaggcaaaaaaaaatgagagagggaaaaaagagagagaataggcatcagtcaccttgctattaggtacaccaatatcttcaaatatgtcattccctagtttgtctatgtgagaagtaaggaatgacactggcttttccaaagtgaaaccaactttgat

SEQ ID NO: 10118 - DNA, 508 bp, Zea mays
agacggtgacctcagagccatcgtcgacgacgccctcacccaccacgacgagctgttccagctcaaggccatggcggccaaatccgacgtgttccacctcatcactggggtgtggacgacccccgccgagcgctgcttcctctggatgggtggattcaggccctccgatctgctcaaggtatggattcgtttcagtactctgagatagaacatcagatatcaaaaaaaatgtgtgcatgcacaaggtaggctgacactgactggagcagggaactcaggcggtgttactttttcattactaagatcacaagaactgttccaatgtaaatcagatttccccttagtacaagaagaatttgcagttccaataaagtatacgaaattccattctgttgcagacactgctgccccagctagatccactgacagagcagcaagtggtcggcatatgcagccttcagcagtcatcacagcaggcagaggaagctctctcgcagggcttggagca

SEQ ID NO: 10119 - DNA, 490 bp, Zea mays
tgcatggctgcatcctctcgtacaagtacaaccaacaactacgcaaacttggaatcctaatcaagaaccaaacgcattgaccacctcacgccatctcgaggccgccgctgacgcactgcacgagccatggcgatcgcggtggctgcttggccgccgccgcttcctggagacgacgaaacgccggcactgccatctggtacggtggcgacccaccaccggtgtccgtggacgacgccgccgtcgtcagcaggctccccccggagatgtccgagcccgagcctaagggggtcgtagcggtgcacgtgctagtctcaatctcgtcgcggcgcctcctccggcaccggccgccaccgccgatggctagcgtcagctccagcccggcgtcctccgctggcggtggcgcgatgacgacggcggggaggtggtgcagttgcaggtccagcgcgcggcgccgcggctgcctgcgccgcctggtctggcgccgccggca

SEQ ID NO: 10120 - DNA, 528 bp, Zea mays
tggtagctagcaattaacaggaaggaagtaaaacatttgtagttatcttgtttattgtgggttgccttttgttccaaactgatgaaaatactaacttaattgggaatgatgttctattaagtttgctatttacctccgaatggttttttgtgctcctgaattttgtttgtggtcaatatgtttgttatactttccatatgaaatccctttttataatattctaatttttaattaattctactcagttgacagatgagatatccaacactgggctccagtctgaattaggacacaagtttttatggggtgaacctcagatcaggtgaatcaactcgactaaataatttggccaaatattcagtttactatcatatgtgcttagtaaaattttgtttggcatcactggtatatatcgcttacttatagatgtaatatgctgaaagaaaaaattacagaaatgatggttttgtagggatcctttccttctttgtagttctgaacttgtataaatttgcttttattcgatca

SEQ ID NO: 10121 - DNA, 579 bp, Zea mays
tgagctggagcatgcaccaacaacaacctactctcatctcaccagaagaatttcctccctgaggaggagaacaagaatctatcataggccacggccagccagaccacagccccgacgattggcttctcagcttaacccttttcctttttttccttttcttttttttctgcgtgcttgcttatactaacaattgactgacaaacttaatatcacacaggtgcatgaacaggagaggagctcaggccaaaaaaaagggggagaagaaataaaaaaaaaagaaccgcaaaaaggtacccatatcttagtagatacgtagcacattccaacctctgcaggaagttgcagttgttgtttttttttgttgcggcagcactctctctctctctctcactcaccacaggattttacaaagcgggaaaccggaattcggcgtcgtctcggggtgttgcattgtctccctccctcacctctgctcctgatgctcgtcgctgtctgctgctacctctcgcctcaacctcagaccagtaataacacctgccagtaaacaccttcgttagacccccgctatcaaaggcacca

SEQ ID NO: 10122 - DNA, 461 bp, Zea mays
tgctttgcatttctgggcaataacaggtccacaagattatcttgataaagctccaccatatatgcctgcgtataaaacagaatttaaggataatatagaaggcatacttgggatataaagaacgtgttaaaatatgtgaaagtgtcagatataaatataagtcatttttgcttctcagaccatgtaaaaatgcaagaacaaagtacttgtcaacaatacaaattaatgagccaagattaacagatacgaatgaacagagcatatgcctaacatgacaaacacatattcctcctaccttcaaagaaaatgaatatttgtttccatcgcgctttatcaccctaaaaagttcagatgtggcccttggagtaagaccaggattgttttctgaaccataaatagtgaaagtctttccagaaccagtttggccatacgcaaatatacagacattatatccatcaaca

SEQ ID NO: 10123 - DNA, 461 bp, Zea mays
tgtttctccttcaattctcttcgtgggaaaatcgttaacgtaagttgtaactttttttttggcacttctcgctattgtttcgacatctttatttcttaagaagtcctgaacctgaattgtaatgcgattttcttgcacctgtctacccgtcatgcagcgggattttgccagcaatcaacttgataggcgacagcgtcattgttggggtgagtgagtgagtctaccgctattattcagtctgaatccagtaaatcagaattccacaggataatagtacctatatttcctgcaaagacaaatttttacatacatcaaaagcatctcgcatggcatgttttatgtggacacgacaataactccgttcttggatgttaaaactattttgacaatctccagatcttctacttcattggctttgcattgttctgcctggaggctttgctaagcgtgtgggtcattca

SEQ ID NO: 10124 - DNA, 551 bp, Zea mays
tgctggccctgctgcgcaccggtgaagttgaactcgggcgtcttcatcttccgggcactgctgccactggcattggcggccgttgatggatcatgctgctgaccttcgacgccaccaccgcctccggctttatttgagcgtggataccctgcgtagtttattcccattaattccaaccagccgcgcactatattatctaactgtcagctttttcgatcgagagattaaagaagctgtgtcaacttgccaagatggttaatgcatggactgaaccagtgggcaactagctaatataatttacaaacttgactgtccatttggtagctctcttcctgatgacgaagaagaaatctgacgctagctcttgtcgaactaatttaaacacggagatcagaataacggaagacgtcggccaaactacacaagatccggcggtgtggccgttaggaggaggagcgcacaaagtgccaagacactttgcaacttgcatatataggctactgtttttagcaagagtgcaagacggcggtgacgtcacggtggagccgtca

SEQ ID NO: 10125 - DNA, 502 bp, Zea mays
tggcatgcaccaaatttctaaggaaagattaccctgaatctgagcgcctgttcaatgctgcattttctgccggccatctctattcgatagtgggtttagctagattggcctctctgaggggtaataagcattttgctctcaagttgctagactctgtcatgtcatctcggtggcctcttgggtggatgtatcaagagagagctctatatttggatggtgataacaagttagaaaatcttaacaaggctactgagttggaccctactcttacatatccctatatgttccgagctgcatctttgatgaaaaggcaaagtgttgaagctgcattgatggagatcaaccggatacttggattcaagctggtgctggagtgcttagaactaaggttctgttgctaccttgcccttgaggattatagggctgccttatgtgacgtgcaggcaatactcactcttgccccagattatcgtatgattggtggccgggttgctgccaagca

SEQ ID NO: 10126 - DNA, 570 bp, Zea mays
tgcagcagctcgtacgagaggctgtctccgtccttggtaatttcctgctcctcgacaagaacgccgtcgtcgtcgacctcaatgccgccatcggtccatcccttgaacagctcctcatagtcttcagaaacggtcatcgcattaggcactaggctcgagcttgggccaacatggttagccatgtccacgtggccagcagggtgggggtggctgaggaacgacgagttcttcagtgacgggagcaggctgccggcggtggagatgagctgaactataaggcatgtcaggtccgcgttgaccacctgctgcttctgcttctgagccagcagctcgcctgcttggtggtggcactggacctgcacctgcccggcgttgtccaccattgtgcggatgacgtccttcacttgctgtatcttctcctcgatgaaggtgaggttgtctagcatcgtggccgggttccagtccatgtgcgggatgttggtggatggtggtgaggcgcccaacagcgaggcgaacggtggtgggtattgctgctcagtccccatgccgaactggtagtagaggttagca

SEQ ID NO: 10127 - DNA, 562 bp, Zea mays
tcgagctcggtacccctgtcggtgattctcagcggcatgatagaggaagtcgtcaccgacgacgaagtcgtcatagtccctttagtcgacgggcccaccctggtcacggtgctggagtactgcaccaagcacgccgaggtcgcggccgccgccagaggcaccagcgcagtcgctttcgccacggcgtccaaggccctcgaggcttgggaccgcgacttcctcgaccgcctcaccatggacgcgctccacgacctcttcgtcgcctccaacttcctcgaaattcaagggctcctcaacgccatcgctcagaaggccgccgacgtgatcaagggcaagaccaccgagcagatccgggacgcctttaacatcgtcaacgacctcaccccggaacaggaggcgacggccgcggagctgcgtcggaagtacacctgggactaccatccagaagcctgagcctaacagtttgttccatgctgctctaaccatctatctcaccacatctgccaccctagcggaaggttccccgtgttccacttcctcccattcccatcgtagtatagca

SEQ ID NO: 10128 - DNA, 495 bp, Zea mays
tgctgctgttaaatttgctgtctcataacgagctacctcctcatcacagacacttaatataactccagctccattggcaacagcccatctgggggtggaaggcataagttgtgggtgctttccagatcctcggctgtaagctaaatcacccagggatatgttgatttttttttccatacacaacaaacattatcgactactacctacatcccaaaatatagatacttctggctgggtttgtccaaaataaagatgtctgagtggtaaagtatatcggaaccgatctacaagaataaattcaaagttgtactaattaccgagaaattaagttgacgagccatactatgaagatatggaagagagttattgagcgccgtctgagaggaataatgagaatctcttttaaccaatttggtttcatgcctagaactctagaaggtcaaccatgaaagccattttcttaataagacgagtaatggagcagtatagggagca

SEQ ID NO: 10129 - DNA, 464 bp, Zea mays
tgctgaaaaaaactgttgcaagtcaattgctgtgagctgcttaaaaaactgatcgaaggcacttgcctttaaggcctatcaaattgcatgtcatgtatatgttctttaagtgagactgaaccaggagcatcatggtattttttgggtgtagaaagtaatttaacatcatgtttatctaatgcatgcaattttggaagctatatagctttagttgctcagctttcacattttcaacataactatggtgacatagtcctatattcttgtttaataagaatgtatttgccttgttttttgggtgttatctatggtaacacttcactgatcactggcaggaatcattggtgaaatcttccatagatactcatagtccaggaagtcctcgaagcgatgaacagttggcaggggcaagccagggatggttaaactggctttctcttggaatgcttggtgttggtggaaca

SEQ ID NO: 10130 - DNA, 493 bp, Zea mays
tgcgtcaacaatgtagccaccttctcatcatcgtcctcagcccaaggcgcagcctccaagtactccaagcaagacaacaccccggcatcgaatacaatggctgcggacacctggagaaggaacagataaataaatcagtgtgcaaaaaatgggaaatcgttccgcagaatcggcatacatgagacggtagaaggccgcgataccttcaggatgccaaggaccttgttcacatcctcccgcatcagcctccggcggagatccttgcagtacatgagccgcagcgtctcggcgtacacctcgacgtcgtcgcagtcggagatctcgacgatgtgcggcagcgtccgctgctgcttggaccagcggtcggacagtttggcggcgaagaacctgctgtgcgcgacgagaatgtggcggtgaacgcagagcgtgacggagaggccgtccttggagctgagggtgaggcggacgtcggaggagtcggcgtcgttgaact

SEQ ID NO: 10131 - DNA, 492 bp, Zea mays
tgcgacttcagcttttcagacagaagcagatggagaaccagttcagtcagttgaaagccagactacggcggctaatcatctgcagaagcctgatatagaactcatacatgtcctacaacaccaggatggtagtagtatcctttcagggaggaaatcggcggcatatcctgagatgcaaaggtagatttatatgctgctatgtgtactcgtcactttttttaaaaaataaaataaaatgttttcaacaatttttttatgtatgttcttgatcatacagccctgcttctgagtcaagtgtggatcgtcgggcaacgcaagatgaaagtcatttagcaacagtaagttaagttacggtgtctgtctacagttatcagtacaccatcagaaactaaactcacaatgtcagcatcattcactgcagagctcagagatcctcgcagcggctgacaagctcgccgagtgccaggagacgatcacgatcctcagccagca

SEQ ID NO: 10132 - DNA, 543 bp, Zea mays
tggcgtggaacgcgtgcgagcacgtcggcagccgccgtgccgcctccccgtctttcatcccctcgaggcacacagcacactgcgcggcctcaccgagcgcggacgccgctgccttgtacgggaacgccggcgcgactgcggcgatggccgcggccgacagcccgccgcggctgaccagccccacctcagcggaagaaggcccggcggcgagggtacgagaggcgcacgagagcacgaacaggagcgcgcagtagatggcgagcgcgatccacaggtacctgacgaacgcggccaggatgaccaggagcagcaacagcgggtacgaagcgagcaccagcgcgctgcgctgcacagccacggcttcgccgaagacctgcgagcgccacggatactccgctgccgctgacgacatctcgatgactgctgtgtgcagtgtgctgatggctttcgtgctcgtggcctcgtgcgagtcttggcgccatctgcgagggactttaagctgtctactgggataacggataacgccgttggacagcgtatgca

SEQ ID NO: 10133 - DNA, 445 bp, Zea mays
tgactataatctacaatgaatagcaagcaatcggctattagcttctatactattgactaccatcaatcctttgtaagtgcccctgacaactctttgtacccttgacagtgtcctactactgtagtgccgttttttggagaccagttcttctggggcgagagagttcatgcacgaggagtgggtcctgcacctatatctatcgcagaacttactgtagaagcactatcagatgcaataatattcatgcttgatccagaggtagtactatttcttatgctttcactatatgcatctggtcatgccaacaatgtttttgatgcagaactctgctttggtaaggccccattgtgctaataactaatccatttatgatcctttgctgaaggtaaaatcacgaacaatggaactggcgatagcaataggcaatgaggatggtgtggcagca

SEQ ID NO: 10134 - DNA, 500 bp, Zea mays
gtggtccttgcagcaggtggcaccttcgatcggacagcaaccccagaccaagcagacgttcctgaaaccaaacgcacagcaacaggtgctgcccgctgcgcaggagaagttctcatcgcagacattgtccggggcaaccgggggaggcggcggcgttggaggggttggagacggcttgggagggtttgcgcccttcttggtagggtaggatgccatcatagcaatcccgcacttcccagtggtggcattgacgttcctctccatacggatgtaaccatcctcgccccactttgcaccccaagagttgcggacaatccagtagtccttcccattttcggtgccgtagccgacagcgacgacaccgtggtcaagattcgtggtgcaagttccactaaagacaccctaaatgaaaaccgaaagacgagtgtaagaacagcagccgtttcttgctgggccatagcatatgctgctaactgcagcaggttttaccgctttgtaca

SEQ ID NO: 10135 - DNA, 537 bp, Zea mays
tgtggggatgccatcagtgcctgccatggatgcggcattaatactcggaagagaaatggagaagcaccagataatatctaaattaactgaaaccagtgaccaacaaaaaaccatgatagtttccattgttggacttggtggatctggcaaaactaccttggctaaacttgttttcaatgatggtaacactatagcgaagcattttaaagttagactatgggttcatgtgtcacaagagtttggttttgaaagcattgttgggaagctgtttgaagctattgcccatggcaagtctgaaagccataacttgcagcacatggtcagaagaatatcagacgagttgactgaaaaggtgttcttgcttgtactggatgatgtctggactaaggaccgaatggagttggaacaatttatggtacttgtgaggagcggtgcatctggaagcaggattttactaactactcgcaatagtgatgttgctgaagcggtggaatcttcatatctgatctaacctgccactcttgtctttggctgaca

SEQ ID NO: 10136 - DNA, 580 bp, Zea mays
cgactctagaggatccccctggtgcccgagagtactccctgaggcgattgcttttagatgttcctgacaatgttgacatggttatcttccccaattatgtgagttgcagaagtaacatgtttgttgaatatggtaatgtgtttcacatctgattactgtattttttttcaggagagcagcattgaacgtgatgacattaaggatcctttcactgaggtataagagctactgttatctgtaacatatatgcaaaataaaggggaaaatggctctgtgtcctattgatgatccaccgactcacttgggaaacaaaactggatagtctcactgtttagaaaaaaacactatagtttagcaaacactgcacagaactactcattattgcattgcagaaaatgataggactggtcggattatcgttggctgtatttgataggttgcatcatttataaattcttttgtgcctgcaggtttccatgtttaagaaaaattatgaccatcttccaaaggatacatactttggcctgtacaaagaagcaacacgtggtaatccaaactacttccttacttatggtaatgg

SEQ ID NO: 10137 - DNA, 534 bp, Zea mays
tgaattgcactactccattgtggggcttctgtacgaacaatccgcttcaacagaggcactgctccagcagcaattattgctgggtgattctctggatccatgctcagattatataagatagataagatagcctccagtgcatctccatccgcctcttcaagcattttcaccagtggaaatatgcctccagaatctgccactgctcttgtatattccagcacaccaccagatattatcttgttgagctctattacagcacttcttttattttcaaacgaaagtgatatcatcatttgctcaattagccttggaatagtctcatagatagttatctccatatctatactactaacaccatgatctcctgataagccagctctggattctagcttaatgaggcatgccgcaagacaatcctttgactgaagggggaaatttgatttgagcgttcttcttagcaaagaagtgattttttcaccgtttatgctgcggatgaaaagatcaaagttcaataactttgagagtaacctcaca

SEQ ID NO: 10138 - DNA, 514 bp, Zea mays
tgagactggaagacattggtgtagtccaatgtggctctacaaggcagtccctgtatgtcatatttatgattccatccgtatagctggttgccagaaatgtgacaaccaccgcaacagagcattgtaaaagcaaagctgaccttcttcttcttcacgggcttcaggatcttaatgacgcatctctcatcgctcccggcccggaacccttcgaacacctcgctgtacttccccctccccaccttccgcagcacctcgtacccatcctgcttcctgcacggacagacgcatcagaaataaaaccttacaccattcaaatctggggatcacagtgtaaagccgagctccagctccgtgcgcctacccccactggatgtcgagcgactcgtagtcccagtactccttggggcgctgggcgttagcgtcggcgtagacgcgcgccaccgaggcggcgccaccgggttgccgcgtggcccgcccgaagcgcggcgtcatggggagcggcgcctcagccgca

SEQ ID NO: 10139 - DNA, 481 bp, Zea mays
tggttcagagtaactgaaaagcctatatcagaaaatatgcccccactaaatgcattatcagcaacatcaattatcacagcattaggcaatccccacaagccagcaggaatactcccactgaattgattttgacttattctgaacctctgaagtgtcttgcaagaagagtaagtggcggggaattcacctgaaaagttgttggtcaaagccagtaagaactggagcttgctgttttggcacaagaaccttggaaattcgcctgaaaaataattctccgatatgtcaattgtgttgagtggtgagaaccgacccaagttggcagggaactttcctgagaactgattttcataggttgagaatgactcgagaaactgcaggttccccaactcttcaggaagttcaccaaagaaattgttgtggtatatatggaatatcctcagcttcttcaggctgccaatctccttaggcagcatgccagtca

SEQ ID NO: 10140 - DNA, 539 bp, Zea mays
tgtgtacagattaacttgtttgggtcaaggagagatcatcacaacggcaaaggagctgcgagaactgcattgtgtactcgtccacagagccagtgcggcgaaggtccttgacctcggccaggccattggagcgcaggggcagtccaaagcgcatgttgacgaaggcggcaaaccgaggctaggacaagatgccatggtcccgctctagcgtgtagtaccattccgctgcgacaccttccagattcagggatgctatccagacccaatccaactcaagggtgcgcataccgcgaaagtatgaggcacacttggtgagccatggaagaggatcggtctcaccgttgaaggatggaaacttgggattgggacgatgatggtcaccacgatcgtggtggtcacggggaggccgcccacggtcggagtcgtcacacctgtagtcgttgttgcatccacggttgtggtagcgccgcctgccgccgccgtcccggcaaccctgattggagcgacgcctgcccatgctgttggaggcgcccaatcca

SEQ ID NO: 10141 - DNA, 486 bp, Zea mays
tgttgcctcttgtacaaatcttgtgactcgtcctgcatcgaaggacaacacaatttgagatctggactcaaggtgtgcctggaaacgctttacagaaacattgagtgaaatgcatgcatacaaggcctgagaactgactgcaaaggggggaaaaacactttacagaaacattgagtgaaaacaatattaatcgctctcttagccacaacaggctaaagctaagctaagctaagccaatggcactcagagattcggtacggcattttcttctctggctttttcaaaaaggactacttgcaagtaaatgacaatgtgtataccttctctatagaaccaaataatgctcccacaagtcacggacaaagaggtgatataatcgagcatgacaatgtatcttaaccattcggtatcatagtactatagcatccttcgagacaaatttacccatgaaccttggtatgcccaatttacatgcacaaagagaca

SEQ ID NO: 10142 - DNA, 454 bp, Zea mays
tgagcacacaagcgcgcacccttggccgtaagtgcagtcggtatggatagacctcgccggcgagcctattccggatgtgctcacgctccgcctccatggttcccaactcgatagagaacggccatgtctcctccgctggggtcagcacaatatatcccttgccagccgtgacaaccttggctgtctggctgaagaagcactccttgaaccgcggaagtccacgagtcgcctcacgcaggttgaggctccgcacaggcacccaatcgatgccagcaccgctgtcgttgtggtcccgcttcagaaagaccctgagatcctcgccgacaaggctgacgacccgcaccaagtcatcgttttcggcgccgtcgtcgacgaaccgaaaggtcgtcgactggtggtgtgacaacgatgcccctcggacgtggtctggcagacggaagctcgacagcacgca

SEQ ID NO: 10143 - DNA, 551 bp, Zea mays
ctgctcgcctcccacttaggttttcgcaacccgagggaatagccagagaaaggaaaccgctcacccagttccttccgccgccacctcttctgcttggtgatggccgaccgggtgaccattgttccgccgcgcgatccgtggcctttctccatcgtcacagcggatgacctggaggcccttgttgctgatggtttgcttcgccctctctccagtgactcgcagccggagtggatggccccttcgagcggagccgccccgtcctcgccgccggggtatgtcgtgagcttcgtctcctttcacgatcgggggttcggagtgtcggcaagccgttttatgcgagcgattctgcatgtctacggggtggagctgcacaacctcagtcccaactccatctcgcaagccgccatctttgcggcggtttgtgaaggatacttggggattgactctcactgggacctgtggacccatctcttctccgcggagttttttgcctcaccgacgggggaaagaagggtccgcatggcggtgcgggccggtggctgcatcctcca

SEQ ID NO: 10144 - DNA, 495 bp, Zea mays
tgagacacgaacagtgtagttcagtttcctgtgttagaattgttcatcagttgagctcgtctccttagtagctttgtcgacgatgccatcaccagcagtgtcggtgttttcctgtagccatcagaaaggaaaaggtcagggagaactctccactaagaaactgtggtgaccctgcagcaaattaaaccatcatcagcgcatgttaagttctgtcataactcttggtgcatgattcagcacactcaacgatcagggaaaagatagtgtgaaacctttcattgtaaactccaccccaaaaccagttacagtatatcatcttgaaaaaggatgaaaagacctgaatttctcaaataacatttgatttcttttattggtgtttataattataagtttttttatcatataagaaaaggatgggatcctagcattgcagatgttctatatgccagagcatgtttggtccctcgcaacgaagagactgctttgaaccatcca

SEQ ID NO: 10145 - DNA, 576 bp, Zea mays
aattcgagctcggtacccctgaattaaagccctattctgccaatagtggttgaactcatcaataaggataaaagagacgattcaacaataagaattaaatttagaagagtaaaatgaactgtgggtcattatttttttttatggattctaatttgagttcttgaacaaaagaagggaacatataggtcctcaatctaccgtgaattctatgttgggtccttcaactaaaaagtgaccatttagatccttcaactgatgtcgttcctgagtagaaatccaaatcccaccacattgtggttcaccaatgtgtacaaggtcaaaggtcaggtgaaacttgcagacccccttattgaataacatgcaaataactatcctccaagagcacacactagaacataatgagactataactggctaaaatgggtactcttattgatagtcaaacctgtcagactctttaagtagatacgggtcaaatgggaagaacatgtcaagcctattaagtcctccaaatgccttcgatagatcggattcaactgcatcttcgtgcattgagatcgcaggtgcatggaacag

SEQ ID NO: 10146 - DNA, 515 bp, Zea mays
tgagactacagtgtgaacttgatagaaggatcacagaccagaatgtgaaaaaacatagggagttgtacaaaccatttttcaaggccatgtgatttagttgcttcctcaaacttctgccttacataagctccatttctcatgtcagatgtatttacctagaataatgccaaacactaatcagtactagtcatttgcccgtgcattgtcacggttcctatatatcatatgagtagactttgttttaataagacacaaaaatatgtgttctattggttagatgagtgtaaatgtggagccaacaaccaaagttcaaaccctcatttgtgcacaattttacttaatttttacattaagcggaaagaaagtgacgcgggacaaccgttgaaaccagtgctttatatagtagggaaaatcaagcatatgaagcagtagacttgcacttctcagaaagaaatgctggtgaaattacctctatcacattgaagccttgttctctggcgcatgcaaaaactgca

SEQ ID NO: 10147 - DNA, 474 bp, Zea mays
tgttaaccataaccagagtaggtgagttctagacgcggccaacggtttcccatgaccggccccgccatgaaaaaaaagggttttgccatgagcccatgacccaacggaatccacacctagcaggcactccaaacggactctccacttttgaattggacaaacacaaagccttgattccttgagggagaaaaaaaaaaaaacaaagagcaacttttagatcacatggtgggaaagtcctgcctgcgtatggtagtgtagatgcttttgcatcactagtcaaacactgtcaccacttcaacgtttgtttcctcctgccatttttcatgcccccaccccactgccacctctcgtttcgttcaagggaagaagaaaaaaacaacagtgccatttatttgagaaatttgtctatgggacatcaacacatgacctgcatcgtctcctcaaatgcacaggcaacagaagtgcttcactgca

SEQ ID NO: 10148 - DNA, 554 bp, Zea mays
ttgcctgcggtcgactctagagggatccccctgctggtatcaatgccagccgactctagaaagcgagcggcgagcattctgagctgcccgttcatggctctcagcatggctttctgccgctcctccctgtgggcggcggactgatgatcagagtcatggcgccacctgcagatactgctggtagcatcatcgtcgtcctcggattcgtcatcctcctctccggttccggcatggtaatcatcatcatcatcatcatcatcttgcatcatgctgtctgctgctgctgctgcctcatcaggcggtacccagatggcgtcgtcgtccgattcagcggtggccatcatgcgaacctcatcctgcttggcatcgtcgtccctataatgcagctagcatctgctgtatgaacttgcacgagctaggacgtacgtactaagaaaaaagagagagagagagagagagagtacgactgggccgggggcgcgcagatgagtaccttgtgtgcagcagaatcatggtaatattaatcgagctccaaatcacacgacagcaagcag

SEQ ID NO: 10149 - DNA, 526 bp, Zea mays
tgtgtcattcaataaccacgatatcaatactcaacagctccctaccaaacaaaatggcaactccaagaaacatggcaaatgagtatgggtttggggctcttacctcctctggatccacaggctccgcaaacactccatatgtatccttcctgcggaatagaacagtggcaaaagggaagaaatcgcgctcattaaaacttgatgcaacaaataccatcttgcgtttccgacaaagatgtgtgaaacacgcacttttgaagtttctcgagaatcatctccagcgccttccggtccggcagtggcgtcgtcctcgctgtccctgaatccaccaagcgggaaaaaaaacaaataagatttccacgaagaaaggcgctcaaaaatcaatcatcgaacaagcagaggccgagcaagcggaaagcaaatcggacctggcaccgaagaccgcttcgtccgcggcgcgctcgcggggtcgctcctaccaccagcaacaacctggaagaagcgcagatctagcgttagcgagcag

SEQ ID NO: 10150 - DNA, 558 bp, Zea mays
tgcacatgcagttttagccgctcctttctcatgatcaactaccacatgtgacacacgcgcttgtatattttagatgcggaatcgctgaactctgtactaggtgagcttcgctgatgctaagtttctagctgtgtcccaaacctgtttactcaggctgtggattctgcttcacctcccaatcctttgacatctgctccgaagcaaagtcagagcgctgcaatgcaaaacggaacgagtgggggcagcagcgcgagcaccgccgcgccggtgtccggacccaaagctgatcatccatcagctcctgtcaccaagagagaaatcgatgccagtgcggtgaagccagagcccgcaggtgatgatgctagaccggtggaaagcataggcatcgctgaaccggtggatgctaaggctgatgcagctccggctacagatgcggcggcgagtgctccttatgacagggaggataatgaacctggccctttggctgggcctaatgtgatgaacgtcgtcgtggtggcttctgaatgtgctcctttctgcaagacaggtaggttgcat

SEQ ID NO: 10151 - DNA, 572 bp, Zea mays
ctgaagcttcgaacaattgattttaatccgaaacgaacagcgatagctaagtaatatttaaccccgtaacacagtgacacacactcggattacgtttatatttaacccgggctaaggaatatttcgaacacacaacccttgggctcacttggggtcgactagtagagcctgtactcatggagctcgaggctggctggcgcctgacaatgacaaccgcagactgcgcgtgcggctggctcgatgtcgtccacgctcgagcccgtgaaccgttctgttttttcctcgtggaaaggaaacccttactacgccagtcctccctgtaccaaaagcctttgcgttccatcgtgttgggatcggtaaatagtacatgcatgacactgctacagttgaactgttacctcggttcagttgtgcagtcgggtaacttgtcgccgcagtaaaactgtcagttgctggtgcacgtgggcatggaaggcgttggcataggatgcgggtccactgcgcatgtatttcagcgccacgatggctgctgcggcgcatgggttctcgcgctcgaatccgcggccaacgca

SEQ ID NO: 10152 - DNA, 496 bp, Zea mays
tgctgctacctccgattgagccgccgctgcctcagattcgctgtcgcggcctcagattcaccgccgccgccgacgatttggacgctgccgccaacgattcagcctccgccaccctggatttggcctccgccgctctcgattcggcgccgcccctttcccttcccctctgccctatgccctcttgctgattcttacctaggcgacggggacgccttggatctttcgggtgcctggacgcctaggcgtcgcctagacggcgcctttaaaacaagggtctcaggtaactctcaaattgtcacgaccctgggtaagggatcgtataggatagctgtggaatgttgccagccgttcggccagtcgcttccttcccgtggtgactgctatgaagaacaatcagcaggggataaggtaatggagcatggaggtgagtgtagattggttataatttgcttgttttattcccttgatcatacattatatatgtagtgattacaag

SEQ ID NO: 10153 - DNA, 505 bp, Zea mays
aacctcggtacccctggtgctttgtgttacacatgccttgtcaatttgaattttcagggagaaaatagttacaaacttctctgaactagatttgcacaacagtattcttatgttagcatttttcttatttgaacagagctgcaagatctgcttccgtcgattatcaaccagctcggtacatttctctttactggatacctattgaattcagaatatgatagatatgtctctttttgtgttctttatcccctcctttttgctaatatagtacttgagaattactgatatcttatgtgtattcacgacctgtgagctccataactatgctgtgctatttacgacctgaaatctcacaacaagctgtttgcttgggtttaatccgaaacggcttctactgattgtacagtgtttaccttttaattgtccctcctgtgcaggccctgacaacctagacaacctgcggaggcttgcggagcaattccagaagcaggcccctggtgcttca

SEQ ID NO: 10154 - DNA, 540 bp, Zea mays
tgcgggcagcaggaagcctggtgttgtggtctaggcatggccaaacagcagtttagaaggatatggaagggttggaatggggaggaagagaacacgagagaagaatgttgctaacgtgtgtgcccatgatgcagaatggatgacgtggatgctaacacggcaaaactagtgccatgtaggatataaatcagcttcaaatgggcttgggtgtgggtgacacagagggggcgaggggtttgtggtcttacaagttataagatgggtgtgtgtgttggggaggggggataaattggacttctcttataattttcatatatcaaatttctatctaatacttgcactggtgggtactgcaggacattgaacgacaacacacctcgacaaaatattatgcatgttaacttttttatttcatagttcgatatttcaataatttgtgagggtcaacatttctgctatggctgttggttttctgtgtacatttgcccatcaatatttgctgctgttacttgttttcatttttaaaccagaacatcatca

SEQ ID NO: 10155 - DNA, 801 bp, Zea mays
tgcctttctaatgtcaaagttctgctccttgcgctctccctaaacaagcacgaagtatcaagcacaaaagtctatatctagaacaaagcatatgatttaaaaccatcagatgccagccagatataagttacctggacatagatatcgaaaaccctcctccctcggcttctccaagactgcatgtctggaaagtcaacctctgcaaattgaagtgtgaccgtgtaatttccattctcaagtccaatgccatagtatctcagagatgatggtgacatccttgctgtttggaacagtgcagagtctagggtgttctcgaactggcgtgaactgtagatgatgtaacttgcattgggtgcatctgcgtccaagaataacccaacgctgctaacggcccatgtaggtgcacccgcaacatagtatgatgcagcactaaggttggcattatcagcttgatagacggaattatctgaacctgatattgctctactaccaccacagtccaccgcaaaggacgcaggtattggagctcgtaccaccacagaggaatcaataaactataaataccatccttttcaaaagtaaaacttgttagaaacaaatgttggatagatcatcaggacgataaggatagacctaggacgtgaagccttaggataatagagggttagctaggtggctatttgagtaagccctacaggctactataaaggatgggagtttttccctattccctctaagttgaaatgaggttgtttaggacgagcatgcatgcatcctttatttaaactacttgataattaa

SEQ ID NO: 10156 - DNA, 449 bp, Zea mays
tgaagaacaagaagtacttctctgtagaaaggattcagcgcaaaaagagagatatcacacaacttctcagtaaacataagcatacagttatggaagataaagtagaggttgtaccaaaacaaccaactgttcttgatctcttcaccaagtctttacatgagaaggatggctgtgaagttctaagcagaaagctcttcaagttcggcgataaagagatactggttaggatccttgacagatatcctttgcatttcccgcccttgcttccaccaggctaatcaagcttctctcttcttaaggcaatttctaccaaggttcaaaataaaacagaagttcacttggcaacaaaccatacggacccacttattcttcactggtctttggcaaaaaatgctggagaatggaaggtaaaactccaaaatgttttccatttgttaaagctgcaagca

SEQ ID NO: 10157 - DNA, 521 bp, Zea mays
tgcctggactcaatacgttgggcatctcgttggctcgcattgactatgcgcccttaggacagaatcctccacacacacacccacgtgccacggagatcctcaccgtgcttgaggggacactctacgtcggatttgtcacctccaaccaagctgacagaagcaacaagctatttgccaaggttctcaacaagggcgatgtgtttgtattcccccaaggactaatccacttccagttcaacccgatccatgacaagccagcagtcgcgctcgctgctctaagtagcgagaaccctggagctattactattgccaatgcagtctttggatcaaagccatctatctcggatgatgtcctagctaaggcatttcaggtgcaaaaggggacaattgattggcttcaagctcaattttgggagaacaaccactattgaaaaataaatcaagttatggttcattgtatggggatataatgatttatttatattttacatactactctatgtatttattttttctagact

SEQ ID NO: 10158 - DNA, 553 bp, Zea mays
tgcgtgatgtcgtcgaacgttcctgcgtcggttccttcgtcggcgggattctcgctgaggtggttcttctccaggcgcggtcggttcatcgtcagagacggcgggcgactctgctctcccgatgaagaggacgtcggggtagaacggtactgctgtcgcggcgactttctttccgttctcctttgaggccggaggaacgggaagaacgacttgcctctccctggtctccttctttctcacgacccgtgtccattctttcgtcggggaagtagacagcggagtcttccgggtcagcgagcttctagctccagcctccccggagacaatctttttccgaagagccggaagtagcgtctttccagcattttcggagtttgttggaggagacttctgttccggcagatctgcgaggcggtgtagaattccttcttcatctgccacggacgagattgtcccgaagcagaatacagatctgggacgcacggcgatcttgctgtggaaggtgacggccattgagctagcttggatcgtcgacacaccccctacctggcac

SEQ ID NO: 10159 - DNA, 554 bp, Zea mays
gcgccaggtagggggtgtgtcgacgatccaagctagctcaatggccgtcaccttccacagcaagatcaccatgcgtcccggatccatattctgcttcgggacaatctcatccgtggcggacgaagaaggaatcctacaccgcctcgcggatctgccggaacagaagtctcctccaacaaactccgaaaatgctggaaagacgctacctccggctcttcggaaaaagatcgtctccggggaggctggagctagaagctcgctgacccggaagactccgctgtctacttccccgacgaaagaatggacacagatcatgagaaggaaggagatcaaggagaggccagtcgttcttcccgttcctccgacctcaaaggagaacggaaagaaagtcgccgcggcagcaataccgttctaccccgacgtcctcttcatcgggagagcagagtcgcccgccgtctccgacgatgaaccgaccgcacccggagaagaaccgcctcagcgagaatcccgccgacgaaggaaccgacgcagaaacgttcgacgacatcacgcag

SEQ ID NO: 10160 - DNA, 557 bp, Zea mays
tgcgtgatgtcgtcggatgttcctgcgtcggttccttcgtcggcgggactctcgctgaggcggttcttctccgggtgcagtcggttcatcgtcggagacggcgagcgattctgccctcccaatgaagaggatgtcggggtagaacggcattgttgccgcggcggatttctttccgttctcctttgaggtcggaggaacgggaagaatgattggcctccctctgatctccttcttccttatgacttgtgtccattctttcgttggggaagtagacagcggagtcttccgggtcagcgagcttctagctccagcctccccggaggcgatcttgttccgaagagccggaggtagtgcttttccagcatcctcggagtttgttggaggagacttctgttccggtagatccgcgaggcggtgtagaattccttcttcgtccgccacggatgagattgttccgaagcagaatgtggatccggggcgcatggtaatcttgctgtggaaggtgacggccattgagctagcttggatcgtcgacacaccccctacctggcgcgcca

SEQ ID NO: 10161 - DNA, 543 bp, Zea mays
tactggggaggcgtcatataaccagctccctacagcacctcccacaaaattcgaggaaaaccctctcgtgcaagtccatccgtgtgggaatgtgcgttccctcctaccaaggatccatgagaagtcatctgtgtatggttaagcgtaagcgaaaaagaaaaagaattacaaaaataagagtgaatcaaggcttggcctatcgaaggttacgataaggtcactgagtgtacttaatctttcattttcatgtagttaaggttcttacccaattatcaagtagtttaagtaacagatgcatgcatgctcgtcctaaacgacctcatttcaacttagagggaatagggaaaaattcccattccttatagtagcatgtagggcttactcaaatagccacctagctacccctccattagcctaaggcttcatgtcctaggtctatccttatcgtcctaacgatctatccaacattcgtttctaacaagttttacttttgaaaagaatggtatttacagtttattgattcctctgtggtggtacaagctc

SEQ ID NO: 10162 - DNA, 564 bp, Zea mays
tcgagctcggtacccctgcactgcgtactggggaggcgtcgtataaccagctccctgaagtacctcccacaagatacggggaaaaccctctcgtgcaagcccgtcagtgtgggactgtgcattcccttcgtccgaggatccgtgagaagtcatctgtgtacggttaagcgtaagtaaaagaaaaagaagtataaaatgaaaagggatcgcaactcagcctctttataactacgacaatggcacgagggtacttaatttgtcatcattgtatatttaagttcttacccggttattaaatagttttaatcaagaatgcatgcatgctcgtcctaaacgacctcacatcaacttagagggaataggaaggaactcccatcccttatagtagcatgtagggcttacttaattagccacctagctacccctctatcatcctaaggcttcacgtcctaggtctatccttatcgccctgacaatctatccaacatttgtttctaaccagttttactttgaaaaaggatggtatttatagtttattgattcctctgtggtggtacgagctcc

SEQ ID NO: 10163 - DNA, 579 bp, Zea mays
ctatttcgagctcggtacccctggtattggagctcgtaccaccatagaggaatcaataaactataaataccatcctttttcaaaataaaacttggtagaaacaaatgttggatagatcgtaggacgatcaggatagacctaggacgtggagccttaggatgatagaggggtagctaggtggctaattgagtaagccctacaggctaccataagggatggaagttccttcctattccctctaagttgatgtgaggtcgtttaggacgagcatgcatgcatcatgtaatcaaactacttggtaactaattaagaattttaaaatgatacgagtcataatagcacaagataaagtaccccatgtaatatggttataacctaagagaggccaagtttttattcctttttcttttatacttccttttctttttcacttacgcttaatcgtacacagatgacttctcacggatcctcggacgaagggaatgcacagtcccacacggatggacttgcacgagagggtttcccccgtatcttgtgggaggtacttcaaggagctggttacacgtcgcctccccagta

SEQ ID NO: 10164 - DNA, 514 bp, Zea mays
tgcaaaactccaagctgtctgtgcagggaagaacagtggagtatagatacatgttcctcatgttctggatcatcatcattagtagtaacgcgcatgccattggtccccggaatgttccgtttttacttgaggggaaatggactcagatctccctcttccatcacgcatgtaccaggcatgcatcatcagctcatcttgcattaatattgctatatatataatccaactacagtatctatatctatatatgaatgatatatacactgcatgcatggctttcctctggatacgtggtatttcatgtgtatggatgctttcgcaatacccttgcttcaattctttttctctttttccttgtacacctttgtcactcagattccatctgctggatgagttcgacgatgctaagaagagctgcaggaaacgcctagcggaccacaaccgccgccgccggaagtcaaagccatcggatgctgatgccggagacaagaaaagggcacatgcgaacaaagca

SEQ ID NO: 10165 - DNA, 508 bp, Zea mays
tgaggacattctcagcatgtggtttaatacaaccaagtctataatccagatcattttggtataacccaatattgatatggtataatccaaagggcattatataatttcatttgctggtatttgtatagcttttatatgtttagtaacattggtgtatgcctgcatcttattgggagttagagaatatattagctgctagtctgctacagcacttggcgtctgtttttaggcatgtaaactaattataaggacgcatcatatatacatagtgcatttgtcaatattgtttctggtatctattgggggctggagcttctgttgacaatgatcaacttgaatccatgacatcacttaaggttttcttctggatgattttttttagttgcaggaagaccatttatattgagcttcactgtttcttattcttagtataccacgcttaggcttgtatacttcgtggatttttctctctctctcttgaaactaatggtgaatattgttctatgca

SEQ ID NO: 10166 - DNA, 498 bp, Zea mays
tgttttgactgcactttagtatctaaaggacagcacctgtgtgctgcagcgtgtagtgttgtgtgtagtgcagtgtagtgcagcccctagggctataaatatgtgtccccagcccctctaagggtatggcattgtgtagtgtttgaagaaataaacagaaaattgccccaactcatagtgtcatcctctgatgagagttagagtccctctacttacattctgtggactgccagttaataattttttctggatatcttatgttttcaaggaaaaatgttgtttcaagcatggtttttggtgctgccattgatttaagtagttagcagtacctttctgttgccattgatcactgataaagaaaaactcatttgcagaagaaaaagttatcggacatgcttgggtctcagtggagcaaagatgagctcgagcgcttctatggtgcctacagaaaatatggaaaagattggagaaaggtctgtttttaatcttttatagaca

SEQ ID NO: 10167 - DNA, 444 bp, Zea mays
tgtaacagactcgtttggccacaggcctagggtataagtactagagttgtaagcattcaaagatatgaaatgaaataagactagacaccacttatctctgttcgagattgttcttcgcccttatctccggcaaccgagcagtaggcctcacaccatgacatctaggcgcgtcggtggccaagggggtgctacacttggtatcggattcagcgatccacgacagctccgacgtcttcggtcgtgagtacgtcttcatcgtcttcgacgggcggttcttcgtcacgtcatcacggctccacctcttcttccatcggcgtagacacgatttgtgttagacgccatggctgagtcgtcgcgggccgcggaagatcattggacacagatgaaggagacgttgcaagtcatcaatcagcgtctcggggcggttgagaagattcaaacaca

SEQ ID NO: 10168 - DNA, 574 bp, Zea mays
tgctggcggaacgcccgcaccacctccgcgagcaccgcggccgggaggagcgtgagcgccgtgccggagtcgacgatcacgccgcccgagccgtcgggccggagcgcgaacgctgactccggtatccgcagccgcctggcgccgacggtcaggcccgtgaagtgtacgtagtagaaggtcgggttctgggggctctggaggagcggcgtggtctgcacgcggcccgtggcgtcaccgtagactccgtcggacagggagccaaacaggagggtgctctgcctgcggctggggtaggacgtgaggcagtaggagaagcggcggatggagagctgggacaccagcgagagcgggttccggccgaagcccacgatgccggagccgttgttgaggctgccgacgttcacggagccgcacccgaagccgagcgggacggtagtcgtgagcccgccgccgcccgacgacgcgaaggtgaagcgctccgtggcgtacacgcccacggtcatcgtgccgtcgccgtagttgtagcggtaggtgcacgtgtcgggcctctcgcaggggtacccgagctcgaatt

SEQ ID NO: 10169 - DNA, 570 bp, Zea mays
ctaatccgagctcggtacccctgctcggctggtcgccatttctgtccggtctccgactgctaaagaacatgcagcgctaccttgcgcatgcatcggtactctcctgtgcaccaggtgccaatccgtttggtatttggacactgcagagcccagatgcatgtgttcaggcaaacgcataagcgaaggcttaaataaataacggataccagcgtctgatttttctctgcgtgatccgtacagttgggtacgggacgtacttcggcaagaggctggatccggagccgggccggtgccggcgcacggacggaaagaagtggcggtgctccagcgaggccgccccggactccaagtactgcgagcgccacatgcaccgcggccgcaagcgttcaagaaagcctgtggaaacgcagcccgcgccccagtcccaaccgcccgccgccggcgccgccgccgccgccaacggcagcagctttcggaaccactccctctacccggccattgccggtggtggaggtggcggggccagcagtatctctgctcccccgttctcgtccatagagagtcgtctca

SEQ ID NO: 10170 - DNA, 522 bp, Zea mays
tgttgaagcatgtacattgcaaagatactactattaggtttagattacaattaatagatttgtttgtgacaaaccgtgttttttgcatatccatacacatgacattccgtagtaaacatctctttagtttttccattcctacagctactaactatactactgcaatcagatagatggtcctactctagttacgcaggattaagtgatgcatagtattaatagcaaatagttggaacttggaaggttttgaacactcagctatgggtatggagaaaacatcttttcaaactgatgcttttgtatattcttatgtgacttgcttaaaatgcatgtcttatgccttattagtgatctcacaagatacctgatgcaaaaggtttccaccacaggtcatcatagatgaagctatcaccaaattggatgaggatttcttctggttgggtggcggagaagttgacctcaagctcggaatgcgaacctcacaattcttaagtgtctttagtccattcgtggtgaaatgca

SEQ ID NO: 10171 - DNA, 457 bp, Zea mays
tgacgccctgggccgagaggtctagtgcgcggcgcaggtctcccgcggcggcggcgaggcgtgcgacgagcagtagtagaggcggaagacgttgcgcgcggaggcggcggagaggacggcggtgccgacggcggccagcatcccgagcacgaggctgccggcgacctgctcgcagaagcgggtgtagatgttgcagagcttggtccactgcagcgcgtgcgcgccgtccagcgccaccacgcacgcctgcgccgccgccaccgtcgtcgcgaacgtcgcgtacgcgcacgcctgcggcccacagagacagagcttaaaacttgtgtacgtacgtacgtacgacgacgagtacggcgtttatttatggtgggctgttcctgccgctgacttgctctgtccttcctttgtggttagtagccgaggccgtactgttcgagcgttctctgtgatgaaggca

SEQ ID NO: 10172 - DNA, 630 bp, Zea mays
cttgcttccttgtgtcgagatgagtataataaggtacaagggttaaaaattgcctaagaaatttgggatgtcctcaagacggcgcacgaaggggatgaagtgaccaagatgtaggattacggggaggctacactagcgcaaaacaaaattttcaaccccataataccaagaactactgcggttataggtcatggaattaccactagacgcgcagagcagcggaagacgtctcgatgtagacgaacgcgtcgagcagtgccgtgcagttgccggcgtccttcacgtcctcgcgcggttcgtccaagtgctccagatgcagcacctccgatgtatccacacgtacagggaggaagcgccgcgtaccgaactgctaggttcgcgacggcggcttggcgagggcgagaggtgggcggcggctgttagttcgcaggtggcgaattaggttatacttaactgcgcccccgcccctcattatataggcgttatggtgggcttctgacgccgaggcccatcattaaccctaaagcccagtctaatttcggatctaatccgaattaggcttccttccccttaagtgtgtgaccctataggttcacgtacaaatagacatagcccgagtactcttacttg

SEQ ID NO: 10173 - DNA, 510 bp, Zea mays
attcacgtgcacgtccttggtagtgaaacgtatcttaatcaactcaccatccaatgccgtctcggagtgaattatccacgacttagccagtactgtcgacacaacgaatccaatggcaatcttgctcggaccaacttgattttcgtataattttggacacatccagataaaatgttgcacaaatctactcaaacgttgcaaaacatagtggcagccaggtctatatatgatgagttgtgaagaggtacaactccttcaaaaatcaagttgattatgcggatactgcaaacactgcaaattcggttgttccctacccttctagagtaatctctccacacacacactcacacgctgctgccggctgccctcctcccgccccactcgtcccctccgaaccaagtccgatccatccatccccaaatttctcctctcagcgcgtggggcagtggcggcggcagcgtgggcgcgcggaccgctacgggcacgggagcagcggtggctgcgcaggca

SEQ ID NO: 10174 - DNA, 495 bp, Zea mays
tgcttcattggataatgcatcccatatgccatcggatgctattatcagccttcctccagcgtttgatagctgaaattacaaacaaaaaaaaacacaaagaagcaactttgacaactcagcataacatgtgccacagagaaactaaaatgcagatccctgcatttcgtaatttatatcaaccttgacttgcttgacatgtggaatgggcacaatgtactccccaacatccatgtccccaatggatcttgaaaggcacaagccaccaggccagcaccggagaggaccaacctaatttcccaaaaaaaaacatacaacagtgcatcagcaagatgctcgtacgattgattgaggataaggaagttactaactgactcgaattgaactggtttacctcctgaccaccgaagagattgagccggcctacttccccaccgctggccgtgacgcgctcccgctcctctgcattctcctccaggcggtggtccacggttagca

SEQ ID NO: 10175 - DNA, 555 bp, Zea mays
acaaccatgtttacatggccaaaagcacaacggtgaaacaaacaaatagaatcaagaattattgcatcttttgctatgttctttttccttgagggttatgtgatgtgcatgctctttctttagtgttttagcagattggttggttcctctagctgagttgattaggtgtaggtggtccaatcagcactccccaagtcctgagttcgacttcccgcgggagcaaattttagtctagggtgcgatcggcagtcggtgcatcagctccaccatcatgaatctgtgcccctgttctttcctctatcaattgtcgctgtttcccttctaatgtgcttcacgttcttcaacctctggtcaaggtcgacactgccaccggtggtgagttggatgacggtgaggagatgaccatcaacttcactacgacgcttatattgcctaggcaagaataaattactctttattcactttaatgtcatgttttttacttgcaagtgttggcccagatctagaactagaaattcttctacgtgtccccaaaagaaacaaacatacagtgca

SEQ ID NO: 10176 - DNA, 558 bp, Zea mays
tgctcgggtccggcaacctcgtcgtgcgcgagaagagcagcagcgccgtcttccagtggcagtcgttcgaccatccgcagaacaccttgctcgccggcatgaggttcagcaagaacctaaagaccggcatggagtggtccctgacgtcgtggcgggcgcaggacgaccccgcgacgggggactaccgtcgtgtcatggacacgaggggcctgccggacatcgtcacttggcacgacaacgccaagaagtaccgcgcggggccgtggaacgggcattggttcagcggcgtgccggagatggactcagggtacaagctgttctccgtccagatggtggacggcccggacgaggtcacctacgtgctcaacaccacggccggcatccccttcacccgcgtggtgctggacgaggttggcaaggtgcgggtcctgatgtggctgccgaccagccgggtgtggaaggaatacccatggctgccgcgcgacgcctgcgacgagtacgcgtcctgcggcgcgttcggcctgtgcaacgtcgacgccgcgccgacgccgtcctgca

SEQ ID NO: 10177 - DNA, 448 bp, Zea mays
tgcatggtacagtgtctcctatgatttctctttgttgcttatggacgcagctctttcttgagatcttcgtactgggaaccttttcatgtgtggttatcttcaggggcctcacatggatcagcgctgacctggcatatccggatgaagatcgcactcgacatggccaggttcttatggattttacccctgcactttccttgagatgaatttaaaattgaggtgctgatgattggctgcccagtagtttataacattgcactggttactcaaactgggcaggggattagaatacctccatgagcactgcagtccaccagtgatccatagggatctgaagtcatctaacatacttttagattctgacttcaatgctaaggtacgcttcccttttttctttaagtacaactcactattcgtactgttcttcgtttcacagtgctgtgaaaca

SEQ ID NO: 10178 - DNA, 585 bp, Zea mays
ttcgaggaactaagcgaaggtaaaggtcaagcgacggcttgtagaccgaggtaccatggctaaggtgaagaagagagtacttgcactaagtcgatgaactaatcagctatgaagagttataacatgttgatgcatcagtaaggtgacttgaagccatgatttgaactcatatatggtgatatggtacaagtcacagggtttgatttatgtttgcttcaaaaggtgagacaaagatgtttgtgatccttatgaagcaacgccatggagaaatcacacatgagacaccaatgacttaaggagtttacttaattatattttatttaacttgagtataggaatcgtcgtactataaagggggatccaaaaagaaggtaggtgtttgccaaagctcaagcctctatattcaaaagctattttttgaaaaccaaaaatctctttaaaattctatggttgaccgtggttaggtttgagaaacctagagtgttcttgttgaaaatcagctaagcttcttcagctgcatctaagcttttcagctgaactaaacttcagctgagttgagcttcttcagctgcagctaagctgaac

SEQ ID NO: 10179 - DNA, 458 bp, Zea mays
tggtgataggaatacgatccctaccacggattggccttaggttgtatgagtgcgagggggctggacgagggaggaaacgcccacggctgtgtttgggcgccgtggatgctggccgcagggaaagagggagatgggctgctgaacataagtacgcactgatgaacagtagcgcgatgaacagtggcggctagggtttctcccagctcccagagggaagctggaaactataattgtttctgcttgattccatagggtggtgcttacaattatttatacttccttctagtacttatctaataagatcaaatccctcttttctctctaacaaatcttatctccttaatcttctaatccttatccaactaatctgcatgtctagatccttatccaactaatttgcatgtctatccattgcctctgctgtgatccggcgcctgtagtggcggccggtcataaca

SEQ ID NO: 10180 - DNA, 445 bp, Zea mays
tgcttcaccacgtacggccaagccatacatgtttgtgtgatcttccagaggtgtttacaggttcgaggagctggcgttcagtttcaacgggggcaaagattcaactgtacattcttcctgccctcacggtcacggccgtcggccggcctcatcttcttcctcttgacttgttgatttatacgctcagtcacgagggttgctaaccaccgacgcgacgtcgaatcgaatcgaatggacaggtgctgctgcatttgcttcgggcgggctactacctccacagagcaagttcaggtggcgacgtggacgacgacagcacggtcctccagaccgtgaagaactgccccatgcggaccatctacttcgaggaccccgatgctttccccgaaatcgactgcttcacgtacgagacggcatcgacgtaagagcgcgtgatctgcagtcatca

SEQ ID NO: 10181 - DNA, 479 bp, Zea mays
tgcatcaaaactatgggaagggtgataagcatgtgcagcaacttgcgacgacgagtcaactctggaagcttgtttgccacccaaccaatctatgcttgcaacattagtttgcatagcaggtgacgaggcaccgacggaactgaaaagaaaaaggggcttcagtgcaagcttttaaaaaagaatgacaaaaatctgtagaaaggattatttcttgctttatgaattccgtacagaaaaggttcgcattgacgttatgtaactacccgcagccgcggaaaggtgccgggacgtgagcaagatcacaagcagagataacttggggaaatggacgagaaaaggttcctctccgatttgattcctttctagttcgttgtctgggttctacctttgcatggcagtggcttataagacagaggctaactctaccttgtgtgcccatgcatacatatgacataccaacaccaaatatgtatacgcca

SEQ ID NO: 10182 - DNA, 472 bp, Zea mays
tggacaggattattcaggaccacgagtcaacggcgacggcgagaagtcctagcaacgacgacgaggatgatgacttcatacataccttgctctccgttcgacacgagtacggcctcaccagagatcagatgaaagctattctgcttgtatgtagaagtatcatggtcgccgatcgcctcctctcgcgtacatgaaaaataaatgtctcacagaaacatgtcaatctttgcaggacgtgttcttcgggggaataggcacagcagccacggcactcgaattcaccgtcgctgagctcatgcggaacccagacgtaatgaggaaactacaagccgaggtacggagcgtagtacccaagggacaaggtcccgtcagcgacgacagcctgcgcgacatggcctacctgaaagcggtgataaaggagtcgctccggctgcacccgccgacgccgatcctgacggcgcacttcaccatg

SEQ ID NO: 10183 - DNA, 540 bp, Zea mays
cggccatctcttcgcggctgctccacggtggggagttcttcgggtcacgaaacgccgccgtctcgccggaggccagaaggctctacgagctcctccaacgccggcagcctatcatgcaaacgttcgacttcaagggctacagtagtggtagtggcctcaggtacttaattaatcaccagatcgaaatgaagagcagaatgcgcaccccatcttctatcatcctgtgaccacgcgaaactctaactagtctttcatatctatgcatgtagggatcaagagtggagtttcagccagcatgcggcggcggcggcaagggctggggccatcaatggccacggcccgacgaaagggctcatccacgatatgggtttgagaaagaacggcaggccgatgtcccatttgttcgacgtgcgggatcgggatgctatcgcttccaaccggacatcgtccgacgccacgggtgctgccagccacggcgtaacgatcaccagaagcgcagatcggaacagcacttggccccagcctaggacaatgtcggca

SEQ ID NO: 10184 - DNA, 467 bp, Zea mays
tgccactgccttagaaagtaccaatgttttatcattgacaaacgaagaacaagatctcgccacatttcctccctcttcttgtggtgttgaggagacagaagcttgcatcccaactttttcactgaactcagtgggtgcattattgaaatgtgaagacatactatctactaagcattctgttgcatcaacagataacacatcctctgcacctccatttgtctctattgatgattgcaagttcctataattggctctggctccaaaatatcactgtccttatctgtaatgttttcttcaagttctctagtagaagcaattgcttcaatttcagtagttagagattgcatgtccaaaaatttgagctcttgttcaccttcagaataagcatgcacatgacactctgatttctccatctcgaatccagaacatgtcaaggaagttccatcaaaccttttttaaggtaacca

SEQ ID NO: 10185 - DNA, 475 bp, Zea mays
tgaagcatactctcttatagtactaactacatctggtttcaggatctccttctttgtcgaagggttacaaaggtaatacaaagccccaagcgcataagtcacctgccgtgcaatcatcaaagggggaattgttcgcatgaggactacatgtacggaatttagaggcactaatattatagtgtcattagcttcagaaatacttacagtattccgcactgggctcgataagcattgtataaccaatgggattccaccacactgagtaatgattaaagcatttgcaggatctgcatgtagaaaggtggatacagaaggtattgagtgcttcattgaattcacatcgattagtaaatcaaagaattcgagttattgtgttgctcaccaacacaggagttacatattccaccaatgccgaactcgataagcctttcattaggctctgtaatgcagtccaagaataactccagaacattca

SEQ ID NO: 10186 - DNA, 458 bp, Zea mays
tgcttcttcctgttcaggttgtccaagaacatcaggtactggctgtacgctcggtccgaggggcctaggagcggcatgtctttctcctcgagaggcttctcgtaacccttcttcatcatggggttcagccaccagaacgtcatgacgctgaaaaccccggctttagcaaacggggtgacacgcgagtcggccgcaccgtcgtcgtgagcctcggcgttcagaggcttatacaaagaactttcggttcctccgttaccatctccttcttcttcttccctggcgtgccgaatgccgtacacaaggagcagcagcgcaccaggcagggacagaacatccaagcacgccttcacggccagcaccttgtctgcgaccatgtgcacgaccgaggtgcagcaaacgaacgcggcgtacgtggccagcagagccgcccagacccggaggaacgccgctccgagcag

SEQ ID NO: 10187 - DNA, 518 bp, Zea mays
tgccttgtctggagtaacatgctggaggacagtggcgatcaaaggctcataatggtcagcaccagcaccacaccatgctgcaagtgaaaaaaaaaattgtacagtctacttaagcatgaccgtgtcactaaataaaaatacaggaatagagactgatttgcattctacagattatatgcatttgctgatgggggagcacggccatgtttgcatctgaaaacacacctgttcctttcatgaaaagaaaaatcggtggctcgcaaacttctcctcgaggactgtgtgggaggaagaacacacagttatcctcgtcaaccattgcatccgctccatgggcttgcacctatcaatgcacaaagaaaacggcccaagatcataaattacaaatgctatttcagctatatcaaatagagataaactagtggaaacatatcatatatgttcaaaaacttaccacgtaaacttctctcttgaactcagtagctaggcattcaatggcaatatcatcgccaaatgca

SEQ ID NO: 10188 - DNA, 570 bp, Zea mays
tgatagtgttaagagcacactgacctgacgaacaacaacataatcgccaacaattaagctcagttccttctccgtggttccattgaaattatgcattacctgcagcacaaaaaacattagtactgtacatataaatagaaacatgccatatacttgtttcgttttactgccagttactcagcttcacctcagcaaggaagtactgggctttctcagcacgcttatgtgaagatatgataggtggtgcagattctctcctttgcttttcagaggacatctacagagaagaaatcgtaaaaaaaatatgaacgcaaaagaattttcacgagttatcataacaaagtgaaaagtgaaagctctacctctgcctcaacgtcatcaagtatagcagctaatctcagatggaataacttttctgcttccgccttcaacgagatgaaaattggcaaggataagaaataaacgaacgtaacaaacgatgcaaaaataatagccattatattataagtaggcaatctcaccgcgccaaccagccgctgaagggtcacccgttgttgttgagactcgaca

SEQ ID NO: 10189 - DNA, 526 bp, Zea mays
cgccagaaactcatgataccctttgcaatgatctttataacagctttctgctttttcagaatgcttgctttttcaaacttggcgtgggcatcagaggcaatccaatggcacacctgagctgcagccacacttttccaaagtcgttcctattttacagagacagtgcatcaaagaaaccaagactatgcacattaaccaagggtagtaatcatattaacgtatttacaagggtgatgaagaaatatggagctaaaagaatgtggggcacaatagtacacaacttgaccttgcaagggaagttctccaccaactagagattgctcaagatgcccaggccccaggccttgtcaaatgttgaagtatggtttaaaaaccagcccaaaaaacacaccctagccctgtcttctctaaagagaataattgctagataccgctcacgtattggttggctcaaagaaggagatgccaataatacactcttttacagatcagctaggcatcgaaaaaacaagaactttactgggca

SEQ ID NO: 10190 - DNA, 556 bp, Zea mays
ggtgaacacccgtgacttgatgcacctctggcggctcgtccaggagaaggacggtggcccgtcgtggatccacatgatggaccgcaccttgccgaccatgaggtaccaagcctggcggagagacccaccggtatgtagctgtgccgtctttcttcatccaccgttaaatggctagagagacttgaacaagtttagaactgaataattgttctgcaaactgtttaggactaaattttatttgatatctgggattcaattcaagacttgttaggatgttagaacatgtatatgccgtcagagtcatagtcgtagatcatctcaaggtgcagactaatgttagacaaattttccttatgatcagctctagttgaaatggaaatgtatgggtcctactactgtactaggtagatgaaaataacactgaattgatttgtttgtgtgtttgcttcattccagaatggtccaccacagtaccgcagtagcactatctttgaggatgcatcaccagaggttgtgagagatttcttctgggacgacgagttccgggtgaagaaca

SEQ ID NO: 10191 - DNA, 427 bp, Zea mays
tgctacagtcgggatatcagtaataaatgaccagattctcgaaagctctgcagatgatgggcaccctgagtagcagtttatggcttgccttttatgcccagaagcccctgattctgcatcatgcccattccagtcacagttttggcaaagtgatgcgttgtcctcaagacatcggactgatgcaggctgtgaaccacaacgatcacaaagaagggtccttgtatgacgtcgagacagtgcattagctgaatgaacattacggtcgcatgataagcacaatgatgccgcatctgatctgcagtagatcattgacctttgtttcccacagaaatcacagagagaagccatgatcctggacagtatttgagaaattctactggctgttcagagctagtatcaaatccaccttccagtaccctgctcagca

SEQ ID NO: 10192 - DNA, 517 bp, Zea mays
tgtttccacttccatatttgccgtatccagtagcagtccagctatttcatcgtctcctgcatttacaggatttagtttttcttccagtgctccggttggattgtcattggtaacatcagctaaatcagatggcacaactgctgaaaataaggcagctagcaccttatcatttggtatagggggtacaaaagctgaagtgaaatctgttgcaccagatgcaagcagcaaggcatcatcggaactttttatttcacctgtgtcatcaagtattgcaagcttttcaagttcccccgccacatctacgcctactttcaccgcagttgcaccttcaagtgatgctgctggaatatctgtggctgcaccatctagtacttccactgcaccaggtttacagtctgcttcaaccccttcatttacatttccgagctctggaaacaacctttttgggttcagctccccagcccaatctactggcctcagtacatcgtcacttgctggtagtacctctcaaccacca

SEQ ID NO: 10193 - DNA, 522 bp, Zea mays
tgagcagcggcaacgtgctctggcagtcgttcgaccacccgtcgaacaccttgctcgccggcatgagactcggcaaggacccgaagactggcgcggagtggtcgctcacgtcgtggcgcgcgccgaacgacccgacgaccggggactgccggcgtgtgatggacacgaggggcctcccggactgcgtctcctggcaaggcaacaccaagaagtaccggacggggccctggaacgggctgtggttcagcggcgtcccggagatggcgtcctactcgactctgttctccaaccaggtcgtcgtccgccccgacgagatcgcgtacgtcttcaacacctcggccgacgcgcccttctcccgcctcgtgctgaacgaggtcggcgtgctgcagcgcctagcgtgggaccccgccagccgggtctggaacgtcttcgcgcaggcgcccagggacgtctgcgacgactacgccatgtgcggcgcgttcggcctgtgcaacgtgaacacggcgtccacgctgttctgca

SEQ ID NO: 10194 - DNA, 541 bp, Zea mays
tgccgcttcggtggctacgtgcaagcggctgcaagtgatatggagcaggaaagtgcgcctaagaatgaacgtgttgggcaagtgagaagagtagcattcacaggaggaggctaacggccaggagatggagacgtatgggagaggcttccagggagcacagcataaggaacagataggcttgttcggttagctctcaatccatgtggattgagtgagattggatgggtatgaatcccaaacaagtcaaacttcttaagaatttttttcaatcccatccaatccatgtgtattgggaataaccgaacaaggtctaacgtggtttggagataaggatggctgggataatgacagagagtgagcagtgtatgcgcgcaacatcaactatggctgaacaacaccaaatatttacgtggcctgcacacagaaggttgctgccctccccacacaaaggctgagatcgagaaggtgcaggggggtgcattcggccccaagctatctgtgccacgccagctactacgtgtccatccaaggatcaatagca

SEQ ID NO: 10195 - DNA, 508 bp, Zea mays
tgagggcggatatgtacaaggtgtacgtgagtttactacactacctatattgcaatattatatagactggtagtcagagttgtaaattggtaatcatttgatgactaaaataaccattttttatatgctatggaaacaaacatctagctgattgttgagaacactgagatcctaccaggtttgaggtcacgatgaaagtagcccctctggtgcatgtatgcaagagcctgaaatatctgaaaacaccagttgcggacttcagactcggagaaaggcttgaccctttctttcataagttgatagagattacactcctataaaaacaagggttcagattcaagaacacaataatggtgcagtagaatatttgctatacataacatatttaccatgtattccattatgaagtataatatatcattttccctgataacctctttgagcttcacaatgttaggatgattcatgcgccgcaaagacttcaataaaataacaataaaagaatata

SEQ ID NO: 10196 - DNA, 551 bp, Zea mays
tgcagcctcatcagcctagcttgcattgcattgcattgcatgcattggctcactccgtgcaccgtaccgatcgaccactacgacgtactgtgcttcgttaagtcagcgtcgctcggcggcgtagcagcgtgctcgggctgacagcctcgcgccgcgtacgtactactactactagtctactactacgtaggtactgtacccgtcttccagagttccagttcgcgctcccttgtctctagcggtctaaccttttgctctgcgcgctgcagaagcagcatgcggctctggctagccgccgtaccgtacaaacgaaatacagaggaccatccagccatccaggacagggagacgaagatgcgctcaaggcctcactgtacgtcaccgggcctcaaggacactgctgggccacggcccaatcagtggcccaacaagtcaaggcccgggtcatgagcgagcttcaattccccacattgtgacttcggagagtatgcggcgggttatcaatattcggggtttttttttttggtgaattccaaaatattttgcttgca

SEQ ID NO: 10197 - DNA, 526 bp, Zea mays
tgagcttttgggcccttgatgccctggagtataccagagtatgcctcaaaaatgccacgtctgagctggttgccataatcaaccatatcatcatcactcaggtcaagtgtaccaaggagtcctgcagctccttgaagcatcggcacggcataaggtaggtatttctcaaaattctcaccaatagcaagagcaatgtctccaaagcacgagaaaatcagaggcttcacagatcgattgagcatagagcttgataggtccttaagaagaaccgtcataatgcgatcacagaaaggcaaacttttatcttctaaggcacgacaaatatcaccaaccactccaacagagatggaacacacttggtactcttcataattctgcaaaccagcctccaggtatgtaaagaagttaggcatgtatttcacaaaatctggaccagtagcatatgcaagagcaccaattgcaagcattgcttcttcatgaacagtagaattgtggcaggcaaagacacgcagaaaaagcaccatca

SEQ ID NO: 10198 - DNA, 483 bp, Zea mays
tgctgttattcgcgactaaaatggcggagaaggctgctgctgctgactgctcacgtctaaaatgggggagaaggctggtgctgctgactgctcacgtccaaaatgtcttttggcctcccagacagcatttaaaggactgctgactgctcacgtctacccaggatgtatctgaagggattgggcgtcctttggcctcccccagacagcatttaagcctaaaatggcttttggactaccaggcctatcggctgatcgcccaacacggcgattaatcgctataaatcgcgattaggcggacgataaggacgatcagctaccctgatccaatcgttacaccttatcgagttctaacaaccgatcagaccgactaatcgcgattagtcggacgatatgtaatcagagctacatagtgtgcatatcccacagttcattgttgcattaatggatctatatttgtctatgactatttaactggaccagaca

SEQ ID NO: 10199 - DNA, 473 bp, Zea mays
tgctgagagccaatctgaagctggggcttggatttcaggctccacttgcccatgaacattcagaggggtgaccgatacctgtaggttgtaaagtggggtgaatacttagccatttgaaaggagggaaagagagagagagagaaatgagagctcacaaatccattctccaaagctctcaaatcggtatcctcatctaaaccttgatgttgcctctcgacaaactgcattttgagaagaaaacagttctcagaattctttctagattcataaatataaacaacagtaaaacagttcgagtcaaagaagcgatttgcacaaccaacaatgtgattaattgctgtgtcaaattggctagaaagtgtatcacctcagcacggaataacttcttcactacttctcgagtctcttgtttaccagcagttgcaacagactcaacctcgaccgcctttcgttgaccactaactctacgtgca

SEQ ID NO: 10200 - DNA, 563 bp, Zea mays
tgcaggcggaaagccaaatcaaggaccgatatgcatggcacgcgcgcgcggtcccgtctagaggagtaaatcgtcgtcggtgaaaaaaaaaacgaaggattaaagagggtaagcatcaacaagaaccaaactactatctcttatctagctagcttccttcctcacattagcttgctgcgcttgcgatggcggtgagcaattgggatcgattcagggctggatgttaccgccgccgccgccgtggacgaaggacggcagcatgatgtcctgcaggagcccgaagtcctgcgctatgaagtgctgcatctggagcgaggggggatacgacggcggtgtggtggaggtagtagtaatggtggcggccgtcgtcgtcgtcgcggcgccagccacggcgctcatcgggccgccgctcatgccgtggttattgcgcgggggcaggagccccagcatgtcgatgacgcctccgcctccgccaccgcctgctgcccgcccgaacggcgccgcgcccgtctgcggcagcggcgtcgggaaggcgccgaggtggtggttgtggtggtggtgca

SEQ ID NO: 10201 - DNA, 608 bp, Zea mays
cgagttacagctcggtacccctggctagttgaggagaagctggtggtagctaggtagctaggtgtaggttcagcaaatcagcatcgtcgtcatgccgcggccaccgtgcccccagccttgccggagccggcgcggcggcccttgaccttggccgagcccgcggcagcgtccttgatcgacgtcaccgcgcacttgtccttccactcctcctgcgtcatgtgccgctccctgcactccaggctgcagaacgccgcctcgcccctgcagacagaccacgtaacgagacggtaagtgacgagggacaaaaaacaaggagtcttgctgcggggcaggtggcgagccagcggagacgtacttgtacatgaaggtgtcgcgcccgggcccgaggcggcgccggcagagcccgcaggcgcgcaggaacgcggcggtctcgacggcggagtagtcggccgagttccggcggagccccgcccgcgccggcgccgcgcgggcgtggtacgccgcgagccagtcctcctgcgccgcggcgcccccgacgccgccgccgccgccgccgagcgcggacagccagtcctgctgcccgccgtcacggctgctgtcgtcggaca

SEQ ID NO: 10202 - DNA, 464 bp, Zea mays
tgcttcaggcttagcttgataagttctcgttctaaaacgaaaaagattctgatttgaattttttttattgaggtacatctttttttactcaataacaacttttaaaatagtctgggaacctcatggagcagagttcatgatttcaacatgtgaatgcccgtctgcaataatcataaaattctcttcaaaacagtaatcactataagcacacataaaaagtaggcattacaagaaacacacaagagaaactccaaagttctagaccatataatgcttgcactagttttgccaacaatataatgcaatagctagttaattgaagatgctaagactaacaagtgaggaagcaggtagctgccatacactttgggtggtaacatgatcttccacagaaattcttcagcatcccctaaatagactcttcgttcaagaagagttggaaagcctgcggtcaattgacagca

SEQ ID NO: 10203 - DNA, 554 bp, Zea mays
tgcggcctccccggcccccgccagggttcggaggcaccgagatctccacgcgcgccggcgacgcaggccggtacccccgccctacgactcggccggcatggccggaaccctagatccccccccccccaccgggcagcgcgattcgcccgcggcgccgatcacgagggaggaacgagcgccaaggcaggatgggtcctccgcctcgggaatagcaggtggggctccgggtgccgcggtcagcgcgcggcgtggcgaggcagtggggaattcggggattcgcgaggtgcgagctgcaaatctggaaggggtggggaggacgggcttccgcgttggcctgtcctggttgtagtgaaggaggcgggccgcgacggaaggaagggaacgggaggaaggggacggggatagagagagagagagaggagtgggaatgggaaaggaaattttagcaacgtcttttttggttttgcttgtggcggttttaccgttccgcccccgcgcttcgctcatttttttaaatggagcccggcatgggcatcgtgcattcgtgctgggca

SEQ ID NO: 10204 - DNA, 501 bp, Zea mays
tgtcaatgagtagggcatgatggcaactatttgctagctaattgcaatcccaaaggcgctgtgtaggacgatcgaggagcctttcctttgcgtgcagagttgggttgccgggagcggactcgtgctagttgagttccaagttggtaaagtcaggtacagacactcggccttgaattgaaaaatgcagcaccagacctgtgtgcccgacgacagacttcgctctctccgagacaggagagaaagcttcatcgatcagccccggaccgccttgcattgcatcgctctacactcaaccacaatgccgatgcttccaagtcttccctagcctctctcgaaaccaagcgcggaagaaaaatgcacgctagtacagtgtcactgataactatgcgtgcggtaaaggcgcacacacacacgtacgagcgcgcgagcaacgccatggatacgattctcgctcgattgcctcgccgctgccggcatggacaaccaaagtaaagacgagca

SEQ ID NO: 10205 - DNA, 470 bp, Zea mays
tgaagcgcccgcgcggcctggcgccggacgagcacccgccgctccagcgcgtccttggcgcccctcgacgccgcgacctccgcgcgcagccgccggagctcggcgcgcgccccgtcgacgcgcaggcggaggtcctccgcggcggccttcttcctcgccgccgcctcctgcctcgtggcgaccgcggcgttcgtggactcgatccgcgacttgagcagcggtatctcggccgccgtcgcggcgaggcgggtcttggccgcggctagttcggtgcggagccgctccagctcctcgccgagcggcatggacaccagccacgcctgcaccgccgcctcgcggccgcgctccacctcctccctggtccccgacagcgccttgttgtggacactggcggttgtgccaggggggagctcggctgattcgttgttgccttcttccattgcctgccgatgagttcgacgtgtgcttca

SEQ ID NO: 10206 - DNA, 421 bp, Zea mays
gtcaaccacaagttcctctctgttatccaaagtgatcttggttgcctccaataatgccattaggtgggacattgcctctcctcgcattacttgcagacgatacagggcattcatgcaccgcaccgtcaagtgagcaatctgacctgggtagatagcccagatatccttggcatgctccactcggtccttccttattgggtcgtcctccttctccgtggggaacaaaccaatggggtgagtggacagctccaaggggtggaatccgcagaaggtggtcagtccgtgaagagcaattgcctccatagtatcctcagccctatatccaaatgactcggaatccaacgaacgccagcctgactgtaggggatgaggctctagggtcatcctcaccctacagcggggcactcggtgctctcaaaca

SEQ ID NO: 10207 - DNA, 532 bp, Zea mays
tcgagaacctcaatggtgttctccctggttcccactagctcctcaagctcttggatctcattggacatctgttccacctgtatgtccttttgcaccatctcagtggacaggtctaccacaagttcctctatgttatccaaggtgatcttggtagcctccaacaatgccattagatgagacattgcctctcctcgcatcacttgcagatgatacagggcatccatgcatcacaccatcaagtgtgcagtctgccctgggtaaagagcccatatatccttggcatgctccactcggtatttccacattgggtagtcctccttttcagcagggaacaagccaatgggatgggtagacagctccaaggggtgaaaaccacagaaggtggttagtccgtggagagcaatcgcctcgatagtatcctcagcccggtatccgaaagactcggagtccaacgaacgccagcctggctgtaggggatgaggctccagggtcatcctcaccctacagcggggcactcggtgctcctcgaaca

SEQ ID NO: 10208 - DNA, 491 bp, Zea mays
tgctgccgcatacgatgcacacacaatgatgatacatgcaggggttcaggaaaaggatgagtaaggataacgatctaaactgtattaaggttaggtatcacctaacacagcaacatttcgaggtacagatgtctcgagtcaacttagggcactagcaatgcaagagagtcttaccagaaaacgcacgcgcctacggtatacggctgccgaatttacatcagctctcgctgtcctttttagtttaacgccgcatcattccaagtcacgtagactactatgtctgactagatagtatgcaacacaactgccatttccttttcccttactactgtaaatcagtcttcaccaatatggaggatacaaatacaacacttaatttgagcagatcccttgtcctttcatcagcgcctactacccaggatgttagcccagccgagtccagaaaattgtatcgcctgcagccaacaagccaaacagtcgcatctggcaca

SEQ ID NO: 10209 - DNA, 523 bp, Zea mays
tggtctgtgttgaatgcttgcagacatgcatgtgatgcgatgccccttgtgcaaacggaacagctgccgaggtgagccggtggatggtgctggaacggggaatgcgtcctgccctgccactgctggtatatatgcctgtttgctgacttgttggtactgatttttggtacgggtggaattggtggttcagggaacaagcagatcctggacgcacgccactctgagctgttcctggagaaggcgtactgggacgagaccttggagtacgagagcctcggcgagcactttcaggacgaggaggtggccgccgccttctgtgccgttgtcaacgcgaagcagttcgcttccccatccactgcatgtacgtccgggcggcaaccatcattccagtgctgtctcttcctcccagttgcagttatctgtctgtactctgtactgtacgttttcgacagtggacagaatgatggattggtgaatcgtgattcgtgaataacatggttggcgttgatgttggcttgtttca

SEQ ID NO: 10210 - DNA, 528 bp, Zea mays
tgaagttacgtcatcacaagcctctgaaatttcatgagagatatcgtccttacctgagagatgcaggtttgcttgggctctcacaaatttgccagaagatgcctcagttggacaaagcattgataactgcccttgttgagcgttggaggccagagacccatagcttccatttggcatccggggagataactgttacacttcaagatgttgcaatgttgtttgctcttcctattgatggtcgtccggtttgttctaccactgatcatgattatgcgcaagtggtccttgattgtttaggcctggatgcaagggggccagcaatgcctggaaagtctttcctgcattacaaatggcttaagaaacacttttatgaattaccagaggaggtggatgatatgacagttgaaaggcatgttcgagcatatatactgagccttttatgtggggtgctctttccagatgggacaggaaggatgagtctgatatatcttcctctgatcgctgatctttcacgtgttagcacataca

SEQ ID NO: 10211 - DNA, 475 bp, Zea mays
tgctagctagctagcgttcgcaagtagcagtagcgttccatcgaggtcgaggcaatggcggtgatggccgaagtagtctcgaccaccggcgcggcgctccggagcccggcctcgcagccgctgccggccgcggtgaagaacgcagacgctgagaagctccagttcatcgaggagatgacctccaacgtggacgctgtgcaggagcgcgtgctgggggagatcctcgcccgcaacgccggcaccgagtacctcgccaagtacggcctcgccgccgctactacggaccgcgccaccttccgcgccaaggtgccgatggcgacgtacgaggacctgcagccgtacatccgccgcattgccgacggcgaccgctcgcccatcctgtcggggcacccggtgtccgagttcctcaccagctccggcacgtccgccggcgagcgcaagctcatgcccaccatcgaggacgagctcaaccgcc

SEQ ID NO: 10212 - DNA, 484 bp, Zea mays
tggagctcggctactacagcaagacatgcccgaacgtggaggcgatcgtccgcaaggagatggagaagatcatctcggccgcacccagcctcgctggcccgctcctcaggcttcatttccacgactgcttcgtcagggtaagaattcttttctgaataaatgtttccagttgtatactatgggttgtgcctgcctgtaacgtaaatcgactgcagggctgtgacgcgtctgtgctcctcaactccaccgcgggtaaccgcctgtctgagatggacgccactcccaacaggagcctgcgaggctttggttccgtcgacagggtgaaggccaagctggaggccgcctgccccaacacggtttcctgcgccgacgtcctcacgctcatggcccgcgacgccgtcgcgctggccaagggccctgtctgggccgtcgcgctcgggaggcgagacggcagggtgtccagcgccacggaggcggccggcca

SEQ ID NO: 10213 - DNA, 539 bp, Zea mays
tgagcagttctcaccagaatgtctcctagattgcttggatctatcatccgagcaccacacacttgaagtggcaaacagaatagaaggtgccatccatgtttggaaactgaaaggccaaaaaaagtcgacacctcaagccaaatcaaagatatcttggggtggaaaagtgaagggtcttgttggagataaggagaagagccacactttgtctgaaagagctgatggtctattgcagagcttaagattgagatatccaggcctgccacaaacttcccttgacatgaacaagatacagtataacaaggtaaagctcatgcaaaaacaaataaccatggacttcttctctggccaaatcaaaatcgatcaagtctttctttcagttacacaaaccacaatcttcactttgtttcttgcgtgtttttaggatgtcgggcagtccatacttgaaagctactcaagggttctggagagcttggcatttaacataattgcaagaattgatgatgtgatctatgttgatgatgctacaaacagatcag

SEQ ID NO: 10214 - DNA, 1015 bp, Zea mays
ctcggtacccctgtatcttattatcatcctttacatgagaaattgccttctcaatggcagtgatttccttctggatatttgacaagatctgttttggctcattcgggttgttctcatcaagcatttctttggttttcttgatatcggtagcaatcttctgaaccctcccttccagcgcggctagtttctcatgtagtttgcttgggtacctgttcatagcagacacgggttttgctgaccctccctccccacctgcagccactttctcaaaaactcctatcctgtctgccaattttaccttttcttcctgcttcctgccctcttcattattcttttgctgtttccttattggatcagggacatcatttgaattcaccacatggacagtgaaaacagggatgacagaagtgttgcctatatcgtcatccttctgggtggcacaacattccacagatttggaagcagactctcctggatcagcctttttggtattcatctccttcatcaatttattgggcccctctttcttcatattgatttcttcagctgcggggtaacagcggtcatttggagtcagcgccgaaatcggtctgggatgacgtcatagacgctgattgggaagctgtagaactcctcgtttctggggtccgagtatcccttatggcggcgcaggaacggctggaaccacgagagcccccggtcggcctcgtagcccctgaactccagcgtgttgtccaggacagaagcgacaattagcgccaccgtcggcccggaagcaaacacggtgtttataatgtcgttgaactgcacaaagacatgtttagatgtcaaagttctggatgcgacccgacataactgcagcatcaagttacagaccgacagcgtatttgatgtggcatgcagaaaatttaacacatgcagttggtagatgggtgatgcaagcactgaatgtaacagatttaaagggagaatcctcaaatacccatccagcatttgtccgggcaggtccgtggcc

SEQ ID NO: 10215 - DNA, 494 bp, Zea mays
tgccaagtgcacttctgaaagaatgtttggagagctcagcttcgtcatcgtcttgactctctgcccaagttcgcgaagcactttagcaccttcttggcccactctgtgaagctccgcacagaaaacctttctgctctccggtggtgcctaaaatttgcaaaaggtaaagttagcaaggaaatccgtgtggtcagtgagtggatcatctattgctggatgagatgcgccaacctggatctctgaaagtatgcacccatgcaatgccatgactgagaatgagcaatgcctcaacgcaccaccaactttggtgtagttcttccacggatatttcaccatcttgtaaggtccatgcggtggctcccatatagcaaatcctagctgcgagcacaggacaccacgctttgcttaaaaaaaagcaataaaacaatcgtagatgatgcgtgcatttcgagagataactaaccaaggtttcctcctgtgctgatgcttcaaca

SEQ ID NO: 10216 - DNA, 532 bp, Zea mays
tgcaaaatctttgggcatgatgagcagtggctatgtatggatagcaacagactggctttctgcagtgatagattcttctgtgcatggtaatcctgatgtgatggaacttacacagggtgttcttgtgcttcggcagcatatagctgattctgatatccagcatgcctttttgtccaagtggaataatctaactaggaatggaagctcttactttatgcatgcttatgactctgtatggctagttgctcatgctgttgagcgctttctgagagaagggaatgccatatctttttctgctgacccaaaattgcaagctaaaaagggaagtagccttcagttagattctctgaggattttcaacagtggagataaactactggagaaagtgtggagtgcaaacttctcaggggtttctggtccagttcaatttactttggaccgagatttggtacacccagcctacgatattctgaatattggtggtacgggattaagaaccattgggtattggtcaaattcttctggtctctca

SEQ ID NO: 10217 - DNA, 481 bp, Zea mays
tgtagcaattgacagtatgaaagaacaaattgattttgctaagatccatgctattgatgctacagttagcagttcacaaggtcctgtgattagaaatgacaatcaagttcataaggcatcaactgtacattggtcaagggagagacaaggcatgaatgatcggcaaattacacaagtttccaatacagaacgagatgatgaagcaagaagtatttttcctgaatcctctcaggatacacatcataacatggatttgatctggcagcaggcagacaccagtgggatctctgatgacaaaaatattactggtttgctcgtggagagcaccaaaaagggatttatgactaatgtggatatgggacaacaagaagcaacaatgggtagctatgaccaagaagtaaggagtgaaattactgcaggaagtagtttaccaagtgattcaagtgccagacagtctgtcaaggaaagcatgctagaatca

SEQ ID NO: 10218 - DNA, 530 bp, Zea mays
tgtcacttctaacaacaggctaccaaacagtgtggcatataatgcaaggcagacacgcaccatttcaacgtacgaccataaaaccagacccagtgttctgacagagcagcactagcacactgctacgtgtgcagttaattaacggagctgttgggggtctgactgcaaaggtgcatccaacatcgtgctggaaccggagatccaagcagcaaatctgacgtactagagctcttatgaagtatgaacagcacctgaattagcgtatcatatctgacgaaaaccaaaaggtactgttacctgtctctccgcttgtaaatgaaatgaatggtggttctggtattttgatctctgtttcttggagggcgtgatagctttgcagttaggcaaggcaatcaccgggggatgatccagtgcgttgttctaaccaaaagggcagtaaacccaaccactcgctagaggtacaagaagttcaggttgcctaggcgttctgtcgcaactgccaacagcaaagggatctgttggtgactgca

SEQ ID NO: 10219 - DNA, 501 bp, Zea mays
tgtggtgtgttttctgcttactgggctcaagtaagtttgacattatgctatcttctcttcttggacagcttgccttgcctcctaggtttgagatgtttgagggatacatgtatacctgaagacgctatgcttaaggatccaaggaggctttatgcaccaggccggatttatcacatagtcgaaagaagaacgtgcaggtaccttttcctcatttggcattctagaatgcaaggaacatcatgtgactgctattatacaacctggatgcatagtatcttttatttgtgtatttatagaggcgttctcacacctgtcaggaaaatagagaacaggttatgctagtagttcaaatattcaatagtatcattttaataggaccatcaatccatcatctctttattttgccaatatgtagttcaagtgttcaactatcatgtaacaccaatgactgtaaacccatactgatactgctaggtacaccattgatattgaacttgcaca

SEQ ID NO: 10220 - DNA, 509 bp, Zea mays
tgctcggctactgccggcggagaggtgagctcctcttggtctatgaatacatgccgaacggcagcctcgacaagtatctgcacgaccacgaaaaaccggccttggattgggaccaaaggttcaagataatcaaagacgtagcgtcaggcctgctgtatctccacgaagactgggagaaggtcgtcgtccaccgggacatcaaggccagcaatgtgctcctcgacgcggagatgagtggccggctgggcgacttcgggctctcaaggatgtacgaccatggcacggatccgagcaccacccatgtggtcggcacgatcgggtacctagccccggagctcgggcacagagccaaggcggcaccagccactgacgtgttcgcgttcggcgtgttccttctcgaggtcacgtgcgggaggccgcccgtcggggaggacgacgctcaagggagccaggccgtgcttgtagactgggtgcttcaccactggcgcaacggctccatcacggaagca

SEQ ID NO: 10221 - DNA, 489 bp, Zea mays
ctgagcacttgtcaatttggaaggccttgttgaagacaccagcatcaattgttctgattatctactgttttctttgtgtatggtttgtgggtggtttatctgtcttccatttgtacctgatgggcactaaccaggtaggtccaacattgattccagttcttttgtcattgatgctgcaaccgcagttcagtagcctaatccttcatccatttttccttgtagacaacatacgagaatttcaggtatcgctatgaccggcgcgataatccatataacagaggtactctgaacaattttctagagatattctgcaccgctatccccccttcgaagaacaatttccgggcaagggtgacagtagagcaagggctgcagcaaacgcgctcacagtctaggggtttcatgagccccagcatgggcaagccaaccattggagagcttgagatgggcaggaagccagtagtaccttgggacgagccaaggacggca

SEQ ID NO: 10222 - DNA, 478 bp, Zea mays
tggtgatggtgggatgagatcacgaggcacagatagaggctactccgtgcaacggtgcaagtcgtcgtcgtggtggcgcccatcttccactgtccagtccacgaggcgcattaacaacacgcttacctagtcaaacaccgggtagatgccctaccctgcccgcatcgctcgagagtcgagactcgctggcctgcacgctcccgtcctggaaccaaacccgcaacgctctgtgtactcggtctgtcccacggcttccatagaccatagagaccgcgacgacgtgtcgcaagaagcgagagcaacctcaaaaaaaaaaaagaattcaaagcatctcaaccaggagccatttttccaaagcatttcttctagtcatgtttcattaaatacagggaacaaaaaaagatttcaaaaaaagatttgcttgcctacggtccaatgggcccaattgcgcagaccatcgatgccacgaatcgaaaca

SEQ ID NO: 10223 - DNA, 560 bp, Zea mays
tcacatatttcaggtttgaatgcgagactggatttcgtaggtgctttcatcattttactagatttctgcacattccaattacttgctcaaagaaatctcgataactgagcatctgaaaggaaatcttgaatggctgctgatgagtgttcatcaagctgcaggttactttgcttctacagagagggacatccaggactaattactcctatcaacatatatacatgcatgtgatgccatctattgccctctttaattttccaaactgaatacattggctcaggccattgaaagtggctgcattcttcaattcctagctagccagcagattttttttcttttaaaaaggccgatctagctcagctaatttctctgttttgggttgatgactgttgtgtgctgtgtcaagtagctggcaaaccatttgtaataaccctctctagctagagtgagactgcttatatatactagttagtcgcacgtgcattgtattttttattttcaaattattagtatatatgtatttacaacatatcccattcacataacacaaacagccctca

SEQ ID NO: 10224 - DNA, 504 bp, Zea mays
tgaagcttcatccgcgtagtaggatcttgatttcagcaagggcaagagcttctgctgcccttgccgcctcttctatcttcctggctgcacggcacctcacctcagcagtgccgatgctagctctcatctgctcaatttcggcagacagcatagcagcttccgatttggcagcactcgctgcattcctgagctgctctagctcagatgtcatcttcttgatctctatgaagatgtccgattgatcgtcacgcctcctctgcagatcgtgcagtgtctgcagcttctgtgcagtccggtccagctcatcctccagagaagcaatcagtgtcgtgttggcacataccttctctcggcttctctccaccaagattctctctttcgcaatgtcgttccgcagcgactcgacggaggcccttatagctgcaagatcactcgtggtcctgtttagattggcttttgcctgctcaaggcccttcagcactgaagtaccaggagactggtgca

SEQ ID NO: 10225 - DNA, 504 bp, Zea mays
tgccaaagctcgcgccgccatcatggacagcaacccggtcccagctctggattcatcatacctgaacattagcatctccaaatccaatccaacattagggggggcgctgaaactgaaagagaacggaggctcacccgatgtcgaggacgcgagaggtggggtccgttaccgtggcgtcgatggcgaggcggtacgcgcggttgcgggaggcgtcgttgagcatgtcgaggtaggaggtggcggcaaggagctgcttatgttgggtcggcgcaggcgcaggcgcaggcacctccgcttccgtttccgcctcgtcgacgacgagccactcggagtcgccggtgagtgggttgaggcggagctggaaggcgcgggccgtaccggaggaggccattctgctgcggcggaggaggaggctgcggagagcggccggcggtgggcgtggcgcgatgccagggaggaggcagctcggcatcggcggacggcgcggcggaccgcgcggcggca

SEQ ID NO: 10226 - DNA, 517 bp, Zea mays
tgtgtaacaaccccataacaatgtgttgtataacagtttcacagcaacctaaacaagttcacattagttatatactactgttacatagcatccattaacaaaacagtggtccaacacctagagtgctaattgctaaacaaaacagctacaccaccatccatctccatcaaccgtcaatgtacccgtgtagaagacgtgcaaaagaatgaaccatcacagacgccatccattttcgatcagtagagtacttgaatgagcccctgttacaagtgcaaaagagatcatcttagcacaagcacaaacaatacaacactagtgactagaaatacagcatatatcacctgagcaattaacaaaaaaaaagcaaccaaccatctagcgcattcatagtgccaaatcactcgaaaacatgaatacacatgtccgaaatcttatctcatctaaggcagataagaaaccacacattccattttgttcttttgctgctataaatgttcctaccaacagtttttgagca

SEQ ID NO: 10227 - DNA, 534 bp, Zea mays
tgcacgaactgaagtacttggtggttgcattcattcaccttttaataactacaagtcaaacatgatatttcttctgagatgatatacttcagctagctagtgccagtggttcactcaaaccaaagcagtgtgacggcaagtacaacgacaagaagaccatcgcactgcgttgccctgcccaggttctaaatcaacacgcatgctgctgctatgctactacttcttcttttttttttctgggaagtcacgactgatatacagactcgagttgcacagcaacaatatcaggcgatggctctgtcgtcgtctgttctagcttctttaatttgacctatgtatatatataatgatctcatttaggtgtgctgctcggtgctcactaactagcactagctgatgttctactcaagtacagaagaaagtcataaaacatgattgaggaaattggctctccaactatttttgtcagtccgcacagtttccgctccttccgtactatggaccgatttcttaacctgtagctttctgtgagca

SEQ ID NO: 10228 - DNA, 544 bp, Zea mays
tgccctgacatgaatcgtagtttggagcaatttcgaatatctattttcctgagggacgagggaagattgacaacctctgacaacccgtgacagtcccatatccttagagattctagagatgacaacaacccgtgacagtcccatattgctagagatgatggaaggagcttatccgatggtgacagcttctcctcaacaggtgcggatgccatcacggcatcgctactactggcctcttcattcaactgttgctttccgtatagggactcaagcttaggacatcctatcacatccatcctcttgagaacaggggaggaattgaatacctctgctagacattgacacccctcaatcagcagagactctagatggggcaaaagctggctccttcctgaagttgcctggtcaggaccattcgccgttgcgtatccaattaggttattgcacccggcaatccgtagcctccgcaaagaaatcaaactttggaatgctttctccggccagtagacaagatcatcacatccggtaatttccagatcttgca

SEQ ID NO: 10229 - DNA, 1026 bp, Zea mays
ctaagaagatggcctgcagttgcgttggtctcagatgttacactctggtgctaatatctcagagtacgaacatttgcacaggactggtctatttgaatcctcaaatgcttgtgtattattcatgtaaatacaacagtgtgtgataaaaatgacaatagacctgtgatatagtatttcagctcgttgttcatttgtctacaaactaaataaagtacagaatacacaagtaaatgaccggccttcttgatgaccttattcaacgaagagagagagagagagagagtactttgacagatagctaatcgtgactatgggaacaaaaattgtgacgccaactattcactatccactatccaccatatgatgattgcatccgctgcaacgacccatgatgtgcctccggaacaatcacaaggtgctgttctcttgttgctgccatagaacaatcagttgaagtttaacagcaaaactagagcatatcatggaagccatggccaaaaatctcactgtcaccaggaaactgggtggacgtactcccagtcaaaatttggatggccggtgccagcaagcatgcagttccgtgaatctggaattgagacatcatcttgtcgcaggagagtctgaaataccgtttgctgggttctgaaggtgatattggttcatggggtcatgaatatgtgaggtatggttgaactgaaataatatgtttcctgtctgctacactgtttttcctggttccttcaatcagtgaagtctaaatttttgtatcgtgctgtattgccaatgctactcatgctacgttatgcaaacacaataagaagttggtaagcatttattggactaatatatcacactatatcatgaaacaataagtgatcttatacaagtatatgctgtttacaaacttggtcacatcctgttcaaataacaacagagcatagggatgattgatgattcttttttgtacttggttttcactcaggattttttttttgcatagagtaacctcttcctgaaatgctgttg

SEQ ID NO: 10230 - DNA, 503 bp, Zea mays
tgctgttacagtacccggcccgcatataaccaaccaaccaacctacaattggagcggggttgccgatcgatcgatcgaacatgcatgcctcagaaggaacagttggagcccggcacggcggacgcgttccggccgcagtagttgagcacgaggggcacgtcgagcggcaggttgacggggatgccgagcacgttgagcctgatggtggcgcacaggcaggcggccaggtcgaggttgacgaggctgcccagcagcgggcagcaccgctggctctgcggcacgttgatcttgagcttgagcaggaccagcacgtcggcgcacaccttgaggtccgccaccgcgttcgtcgggcacgggttgccccgctgctgctgctgcgcgcggacgacgacgacggcggccggggaggagagcagcagcagcagcagggccacggcgagcagcgaggcgatgcttttggtggccattgtatttgcacgtacgcttggtgtacaggagcagca

SEQ ID NO: 10231 - DNA, 487 bp, Zea mays
tgcacctgggttggatactggagaaggttgcctgaagagactactgaagctaagctactgatgcgttatttggttcagttaatcagttgtatcctctgcccttgtaggctgttgtacctcacctgtgtcagcaacatttttgtgaatctaaaacagttagcacatcaacaatgctgacagactagaaccgggctttgccggtctggatgtactgcttacgtgcattgatgctagtgtggacagcaaatctctgcactgcatcatcagactgtgttcttgaatgaaaactctggagagctgggacgcaaagacatctgtccgagccaactgcagaagatggaagacggttcagactggaaaatagcagcattctcatcttagagattttgtgatattggcagcatgcatccagtctgtgtaaatgtcatgtgattcaaagagaactaactggaaaaagaagttctgtatgacggcagcaccttaggca

SEQ ID NO: 10232 - DNA, 489 bp, Zea mays
tggcaagttgctccttttttcgtccccgtctctcctctgtttttttataggagtatgcaattatactactattgcatgccgagacaagacgaggtccccgttaacaggagaatctgtacgtttcctacccgaaacaaatctccggtctgcaaatctgatgagtcatccatccatccttctgcgtcctgttctattcagcggcgcgccagccatggccatgctcatcaccatattcggacatcggacgacgaaagtccaacggcggagcgcccttctccaggtgaaatatattcttttgctttttgctgtcgctagcggacgcgcacgctacagacgagtcgacgcctcgacggacgcttttggcagggagccaggcaggcaccccatgccagtgccagagccatatgctggcagatgcagcgcgagagagatgcccaagtccaaccggtcagccccggtgcatgcagaaagcacggatgcagcattgca

SEQ ID NO: 10233 - DNA, 501 bp, Zea mays
tgttgctatcacgacttcatatttcccatgtctagcatccgcaaaaatagtgcaaaacaagccctttgaacccacagccctcttctgttttagaaatttggggctaactattaaaccacacatatcttaatgtttataaataaacaaaaattatatttatagtctagaggcagttctcccgcttcgtggcaacgcacgatcacatatctagtcaaataataagtattggagtagtatattactactgctaatctctgtactatgagctacaaaatgcatcatatgctaattagtgtgaattaaccgttaggctctcacagcaagctgcggtaccgaccggaatcgaccggtctctgcaaacaaatgctttaaaagttttagagcattgagcttattttttagctctaaagctctcagtgagatggactaaccctagacagaatcaaaaaatcaaaaaaaaatcggcatccgtaataatttttggtggcatctaaggagaca

SEQ ID NO: 10234 - DNA, 487 bp, Zea mays
tgcatgtactttgcttttggggtggtctacttctcttctcttctcttctctcaggtatcgctagccagttcttcttgtgaaacctgactcctgagagtcaacttgatcagagctaggctgcatgcagggggcttgagttgagttgaggatagacgatagaaaaggagaggcatttcagcgtatctgcgcagggccggccgggccgggggggcagctccaacatgcgtcgctttcggcgagatttgaggatctggaatgcatttctctgtcttctccagcaaaaagcacccaccccggccggtccatcgtttctctttcaatcgctgacgaggaagccgcttcgtcccgcctggcttcagcaggaacagggtccatcgacagccgcagttcggtttcggtgcttgctgccatcatgtttatttaggtatggagtatacttgtcaaatcgtgagcccctgaatccgttccgccgtggtccaactgatca

SEQ ID NO: 10235 - DNA, 512 bp, Zea mays
tgcacatctatacattacatatgaacacgagagagtatccatgacgaggacgtacagttccaggtatacatgtatatatgtatactaattagcactcccctaaatacaatgtaaacaagatgatcgatggaaacaaacaaataagcaaaaaaaaaaaaaagaagaagaagaggtgggaacgttgacgtgacggaccggcgcattctagttgacggccctgcagttccggcggatctccccgcgggcggcgcccgttcgcacgccgacgcggcccatcttgcgcacggcgttcttgaactcctggaggaagtagccctgcctggtgaggcggtggatcatgccggcggcgcggcggtcggcgagcagcgcggcgtcggaggcgaagaggccgcggcccagcttgaggttgacgtagtagtgcgcgtcgaaccgcgcggggctgccggggtccatgggcaccgcggtcacgttgttggacgacgcggttgacgccggcccgcaccgcgcccgca

SEQ ID NO: 10236 - DNA, 520 bp, Zea mays
ttgcacacttacttgcaggggttttcgctgttgtacaccttcatcgacaccatgactctgtgccctgggtggctctttctggtgatatttatgacggtgtacttcttcgttgtgaggcggaagtggtcgccgcactttctgaggttccatgtgatcctagcgatccttctagacactggctcccaagcagtggccaccatgtgtacctggatgccaagcatcgtttatcaggggaagccaatgcagtacttctggatgtctatcgcgttcatacagatcttcacagtgctcgagtgtttgcgctgcgctctttgtggaatgtatcctaatgtcccattcatatcccacaccgctttcattcactctgatctgaatctgttcaggtaggtgcttactacataaggtccaggactcaaggaaggatttcggaatggctacttacagttgtagagagtctgttttgttcatattgaagtcctgtgtaattcttatcataggaccaggggtaccgagctcgaat

SEQ ID NO: 10237 - DNA, 550 bp, Zea mays
tgctgttggaatctggcaataacaaagataaaaaaatattactgctagcaagaacaaggagatgcgaccgactggcaaattactgatagctgctgctctttagattacagacgtaaagaaaaaaaaaactgctgaggagcacgcacagttcgtaggagatggagcgaaatatctgtgcttagcttatcgaactggcgatgatgctctcccctagctggctggctggcttcttcaacctgtctacggttcgatctacagccccagttttctctcgaaactaaaccctaataaagggtgtgtgcagcgggcaccgttgcagtttgcgccggcgcggctgccaaagcctcgcctgtattcttgggagcgacgttgcttgctcttgcagcaatgtgctcgctcgctcgctcctgttccactgttcctgttcgtgagcagctcaaccacttccctgattccctccacgcagagcagagccaagggacaaagctagctacagtttggagcagtaaacacagcagaaacaatgaacaatatgaaaacagcaccccca

SEQ ID NO: 10238 - DNA, 513 bp, Zea mays
tgctcctccctgccattcgccaccccggtcgctttcaatgggtcctatgaaagctccatcacggcggcaggcccctttggatactcctacccaaatgtggcagcctttcagacgccgatctatggaatggaatgattcgggccgcccggtcgtggctgctgctgctggccggcctccgctcgccgctggcgtctcgcatgtgcgaaaagggtggggagaagccatgagaacacgagactgacatgggcgctctcgcacaaaagacataaagcagggactgaaagatcagaggtaccagtagacagtagtagtatgatggaagagacagtaagcagcgagtggtgtgctgcaggatacacttactgaccatcgatctgctaacaacaaaatgatcgttgcagctagctctatagcatatttgcctttgcccttttgtagctttggtctggtctctctctctctctctctctcttttcagctttgttgctccccagcgtcctgcactgcatgcca

SEQ ID NO: 10239 - DNA, 515 bp, Zea mays
tgaagacatgggctgtccgatggacagtaaagaacgacatcctccagcacttcataagcaaaatgatgtttctgagcacaagtcacagcagcttgatgacacattgaaacaccaaaagagctgtgatcatcctcaacctgtaggaagccctgagcaggatggaaaagactacaagaggcctaagcttgacggataggtttatatatatatgattttggatgggttttctggaagctgacaagcaatttggtgccggattcattgtatgatgacgtatacatgttgatgagcacgtgtcttcttcgctggtgcctgaagaagtgaagatgccgcgccacaaaattgctgtgctgcggagagcaccaagatgatgcgccccacaactgattgcagcttacagtttgaggaaagtcgggcagcaattattgttaggttccaacaaacattggaatataatatatatatgaacgaaacatgctgtcgcgcttctggtaacagggggatcctctagagtc

SEQ ID NO: 10240 - DNA, 470 bp, Zea mays
tggaacgcgagcacccgtctctgccagtggaagggcgtgacgtgcgctgacgaccccaataagaacaacggagcagcagggcgagtgacggagctccgcctcgcggggctcgggctgtcgggcgccatcgccggctccgtcggaaacctgaccgccctccgcgtcctcgacctgtccaacaaccggttctccggccgggtacctgctgtcgacagtatccgcggcctccaagtccttgatctgagcaccaactcgttagaggggagcgttccagatgcactcacaaactgctccagcctggaaaggttgtggctctattccaacgcgcttacgggttcaattcctcgaaatataggctacctttcgaacctagtgaatttcgacctgtccgggaacaaccttaccgggaccatcccgccgtcgatcggaaacgccagcagactggacgtgctgtaccttggtggaaatca

SEQ ID NO: 10241 - DNA, 456 bp, Zea mays
gagaaggtcatggatttgtacaagaagaaatgtgaaggtcctctaagaacaggaatcaggacagggattataagtggaatcggttttggagtttcctttttcttgctatttggggtatatgcagctagcttttatgctggtgctcggcttgttgaggacaggaagacaacctttcctaaagttttcagggtaagtactctatggtagtactgataaatttaaccttatctggctttcatattaaggaagaaaggactacataaatgtgaagtcaaagcaacatggtttgtgttttccttttttaaagatgatttggagtgagtatcatgaatctttccaatgaagagctctaaaaatttgtccttctatacgcaggttttcctagctcttgcaatggcggcaattggagtgtcgcaatcaagtacccttacatcagattcttccaaagcaaaatca

SEQ ID NO: 10242 - DNA, 575 bp, Zea mays
ctggccatccataaacagaagaatcagttgttgccacccatattgtgtcatcttgcatagacaactgtagaacagggtaatcatttgtgcagagtaaaagactctctcttgtggacaaatctgttaggtatacctggaacacagggaatacataaaagttcagaacgacgaagtacagtgactattcaataatacacacaagacaatttaactcacagattgatctcttccaccactgtagacatgaccaaatgcaggagtgcttgcaagtgcccaaacagaatcagtatgcacagcataagaatgaacacaacgctgctgtcctagatcccatagtctgcaaagtaaataaaaatatgtatctatgatgtcaaacttaccacagcatttatgctaacatgagagagggagatggttgagatgttagagctgtgtgtttaccttatcattgaatcagatgatcccgataggcaatacctgaaaacattgtaaaaaactattagtaaatggtttgatgaaaacagacaggatttaaaagtttcaaatagacaaatacactccaggggtaccgagct

SEQ ID NO: 10243 - DNA, 548 bp, Zea mays
ctggtcccactactgcttaaatgttatcagtatcacatacaaacaattattacaggattcacatcaaagcaattcaagggagttcccccaaaaaactaactagtatgcaggtaagaactgttaagagtatgccatcaattggattggatacatttccttgcagtcaactgagttgattttttggtatgcagaagctaaataaaaaaaaaatgattctgctttccattttgtaccatgttagagcataaaccttatttgcttccttcctttgcacaacagctttcaggtacaagctaacatcagtacaacaccaaaagatagattgggcattgcatgaatcacatgcgtatgaagaagccagaagagtggatagctgtttgtgatctcttcctgttctgttctgttctgttcacggtgtcacctgcttcagcgctcttgcactgccggtaggaagtcttacagagatgagagctaaaagggtttcaaagtaaacaggtttgtttcagaaacgcttcacagaaagtggcgcgcagagtagtgtatgtcca

SEQ ID NO: 10244 - DNA, 475 bp, Zea mays
tgccttttccgtggagagggaagcagcggacagcactacagctacagcaggcacgaccgggaccctcgcatggatacacctggtccacgtaccgcgctgctcggctgacagctagtctaccaccaggcaccggagccgcgctacaccgcagtcggtccggaagcccggcccaacttgccaggctggcctccgccgtggaccatcatcacccacgggaaacaggcgccgtgttaatggccgccacaacggtaaacgttacccttgccgaagagaagggaaaatagcagtagcgcccggatcccctctccttcctccagatcacaccactgccgcctccgcctgcaaatccatttctagactcaagctgttgctgcgagcgagctagggttggtgctcaggtctccagggttttgcctccccgctcctggtgcccatcgccttggaccttggcctgccgggttagggttgggtcgca

SEQ ID NO: 10245 - DNA, 485 bp, Zea mays
tggtaccataccagcacacatctcgtgatctgtataggtgtccgtgatctgtaaatatggctctgaagtgtagctaatctcccatgtttcgggcatgtggtacaataaatatgtaagtgacccacactttccggcagcttcgtgcagatcttgtgagacatttgccgcgctggaggaatactacatcacaaattcacaatgtgcatgtcacccattttcaccattaattcacacaaggatcgagctggttgatttaacatttgcgacttacgattttacgaaaagagttcttggtgactgaatgtttgacctgttcacacgaggtgccgtttgattcacatttgtgaattgttaccatgcgaaatcttgctagctatatttaaagatcaaccgtatggcctaccacagtatcacgtcacacatcacttcgatggcgagatttgcgcaatgaaagaaaccacatctcttgtgccgacggtcaatca

SEQ ID NO: 10246 - DNA, 514 bp, Zea mays
tgatggatcctatgcagtcatcggtgagaggccgcaggtcttcgttgcatgctgatgctgtcataactattggaggagtgcgacctgcaccacccccacaaacatccacacaacatgtatgtcaagatgaggcaatggtcagcagcggggatccctcttggatgtctggttacaggtacgcaatccaggttcagcagtcaatcgagttggttggttcatgtacatccctatcggacaaaccaaatcccatgatccaactccatttgtttgtccagccaaaattcacaaactaaatctatagctccacaaccctaatgctagttagttcatgcatatatcactgtgtgcttttattaagactcatagtactattttggattaaccacggcatcaatggcagtgttccagccattgagttgcagtgattcagtttttgttttctacggcagagtatagcacactactaatccgaacatcgatgttggtggtgccagttgattagcactggtaactt

SEQ ID NO: 10247 - DNA, 481 bp, Zea mays
tggaggcgagccgggccaccatcgattcgctgctcaccgacgggtccaagctgatggactcgttcagcctcgtggtgaaggagctcgaggagtcgcgtgccaaggtcaaggccctcgaggacgagatcgcggagacgtcgtcgagggccgcaggcgaccactgcagttgctcgggctcggagtcagaggcctccgagctgagggcggagctggaggccgcggaggccaggtaccaagaagagaagatccttagcaccgtcgagacgcagtgcgcgtacgagctcatggaccagataaagacagagtccgacctgcggcacggcaagctcgcggcggcgctcgagggcgccaagtccgaggtcatcttcctcaaggcgagtctgttcgacaaggaatccgagctacgtagtgccctggacgcgatcaagaagctacaagcggagacgagagcagacggctcggccgacgcgctgaagcagca

SEQ ID NO: 10248 - DNA, 468 bp, Zea mays
tgatatcagcagagtaataaacattatttaaacagaaacaatgtgaacaatgacaaaaactgattgctgtttggatagcattgtgatctttagtatggagtgcaccttctgtttgcccccattaatcttctaatattttctctgttcatatgcagagagcctgaacagctattctaaaaccatggcgaagtttcagaatatgcatgattcaagacagctcatggctgctgctaaccttgccaataaccagagcaacaccaaactaatggggaccaaacaagaagcaagtgcttctgcgaccaaccagactcctggtgtcggagccatcggcaataatgctcttcagcatgccacacctctaaacagctaccagaatatgctcagaagctccagtgcaaatccagtcttgctgcagcaggaggcatcgagtgtcttcaaaggtcctacagcaatgcacagtggcataca

SEQ ID NO: 10249 - DNA, 542 bp, Zea mays
tgttcactttgtcacttggagttgaggtcatctataaacaagagagctcctccttccatatctccaaccaaacgctggacctgacggaagtagtacctcatagctcctcctagacctctaacacacaagcactcccaatgcgttaatagttcaaatttgtgtgcccagacctaaaagagcagccaaagtagtgtcaaatttacacgagaaaacctgtagaattgaactggggtcagaaacttcaaaaggatcaattccactcacctacttaaattgatccaattgtccttactctgcataaaagcgttaagatagagcaacacaatttaaatattcatgtgcttcctttgaaatgtaaattactgttatgaatagcacttgtaaatatgcactaagccacttatacaatggggaaatacagaaagcatagagacccatctatatacatctaacaacccctcaaactcaaggtgggtcaaccacattgagtttgaagagatagaatcaatgttgagctctagtttgtgtcttgatgaagaaat

SEQ ID NO: 10250 - DNA, 440 bp, Zea mays
tgcatttccttgcgtcacatgctgttagtacccgccatgccttcacatgtgcttgttcacggtcgccggagcatggagccagccagaaaaccgtatacgggcggccttctcggcgtcgccgcgcgatccagggtggattctggtgggcagcggatcagaaatatcccatctccgtacgtgctccgcctgccccagctcgaaaatggcggctcggctctctcgtggcagaaccgcagggagtctggtgggtccggtttgggcgctggcgagacttttccacggaatgtcacaaagctcacacaatgtgaagtggctgagcgcctgagccagcgctcgagcagaggaaacttcttgcttctgttatgcgtcaaataccgctgtgtatctgtgtgatgaatgggtggatcgtcacttttatttttggtttcttttaagtacca

SEQ ID NO: 10251 - DNA, 522 bp, Zea mays
tgcagagtaataaaacacagtgaagaaaaaggagtaactgttacgcaactcgtcaggaaaaaaatgccaataaactacaatcgaaatgttggtgagaactgagaaaatatgacgcggccaaacgaattattgcatacatgcagaaacgctagtgttggatagttccagaaggaattaattatacatgttattgtgctccgagatcaaaataatgtaatgattctctatgcgtcaaaccttataacatccaaattccaccaatggtaattaagctgaagccgtgctacatgttcagcatgagcgtaaactaagctcagattactagtcttaagataatctaaggacaacgacgatcatcccaaacaacttaagtaacagttctacagcgacaacaccagtacagggggcgcctcaaggaccaaaaccgttctcttctctacagtagtgacgtaacactggacggatcaagagacaatggccaaaggtagtagtacaatacatccggtggaaacctacttccca

SEQ ID NO: 10252 - DNA, 526 bp, Zea mays
ctgagatttttcattgttcaccttgctgacttgggaatggaattgtaagaaaacccgctgtaaatttgagtgctagttggaaactcaaattctctctgaaattcgatgggcttggggaacatattagttattttccccaccatggcttctttggagcaaggggattgagaatgttaaaatctctaactatttatcaatcctatgctctcaaacaaacccttattttcctcctatttttgaggggtttaaaatttcaaactaagcggattaggggggaaatccgaaaggacaaggcacctaacgaagcacaccttccatctccaaccgtcgaaggccccataatcagacggcggacaggcggagtcgcggaaaccacaaccgcacgattcgtacaacgtccaaaccgagtgggtccccgcccgctgccgtgcttctccccattttccgcagtttcttcaggttttctctttcctctcctcgcttatcttcctcccaagcaaccgcttctcgccgggcgccggcggca

SEQ ID NO: 10253 - DNA, 515 bp, Zea mays
tggtccgcgaggctggggtccggcatggggttctcgaacaggcccatggtgaacttgacgcgcagaatccgagtcacggcgtcgtcgatcctgctcatcgggatcaggccgctgttcacgtgacccgtcaggatggtgatgaagttttggtagttgttgggcaccatgatctgaagtgaagcacaccaccaccacacaagagttgtttaggcaacgccaaatcccgaccatgtcaatgctagcttggcttaccatgtcaaggccagcaagaatcgaagcctgcacagagtaggagtagttcgtccctggagggctggtgatcctgtcgatgccctcccaatccgagatcgtgaagccctgtaaaaatacacaggcagcttccaacggattaacatttgattaccgtttaaaaaacgcatctatcttcttgttgttcttctcacctggaagttgagcctgcccttgaggaagcctgtgatgaggtcgtggttggcgtgcatcttgagcccgttcca

SEQ ID NO: 10254 - DNA, 560 bp, Zea mays
tgataataaatgccccgccgagtcctgctcctacacgggctggactacaggaacaggatcagggacgctgcggcgtgttcgattcaaatgcgtgcatgattctgccatgccacgagagcacgccgcggcgcccacaggtagagtagagatccgtttcgaaacccgtcgcagcggacgaaatgacatccgttgcttgctgcgctcctgaatcccacgcgcagaagaagggccgcgcgcggcagccccggtcgtcgttgcactggtgcacatgaacggcgcgcccggtgccacctcctcctgcctggctgcctcgttgaccatccgcacgcgggcaacgaacgcgtcgcgtcgaggcgcatcaaaacccgtattttgatgatcaggctgctgcgccgcctgcgtgccgcgctccaggcattggtacacccgtttcagcttcaaacacgttggcttgaggctgcttgccgtcccgatcacggcctagcaggcgcgtccacggatgtgccgtgcaccctcgtgtgacctctaacaggagctcgaccaggggtaccgagctcgaa

SEQ ID NO: 10255 - DNA, 550 bp, Zea mays
tgagcaacaaaagaaaagtgttagaatataacgattaacacatgtccaccaaactgtcagaacgaaaggctaaaacagcacacgatattgcaaggcaataaataaaacaggaggtagatgttaacgtgtaaatataaatccaagcaaacgagcaagtgtctcgatatgttctttgttcaattgtgacctagttgtatccccttaattaatcccttatctatcatttcaccagttgcctttgtctggatgtatcactaaacatcattattcaattgcagaacagaaaataaatctactacaagattgagattcattcaatggaagactaagaatgtaaaaaaaagagcatacatagggcctgtttggaatagctctagctccaagaccaatacaggatttggagtttgtagtatgaaataaacgggtataaacatttgttcaatatgcccccaactccagccccaagaatttatagagctacagatgaccagctcaaaaaaatctgggagagctctaccatgccaacatcagaaacaaaaactgtaatgcc

SEQ ID NO: 10256 - DNA, 511 bp, Zea mays
tgccaggagaaatcaaccgcctccacgagctggaagtactggatatccgccacaacaatgtgcacaagactgcaacgagatacctccggctcctaaagctgaagcggctgctggctggttgcattgacgacccaactctaccaagtgtcgagcttcctgaaaagattgggaaaatggaaggcatggaggtattgcttggtgtcatgccgcgtcataagaaagatctgaaaagaggatttcctgtatgcctgaggaagcttggtgtggttatcaacaaggatagttacctccagcccttgcttaaggcaatcgatgacttgcatgagaacctccggtctctgtcaatcactcttcctattgtcagaggtgaggccacgccacccaaaggaaactcacaaccattagctcatagccttgaacgtacgctggaccaacttgagagcctaagcataagtggaatcacacagatggggtggcagcttcttccattgctgactgaaaaaagtaatca

SEQ ID NO: 10257 - DNA, 511 bp, Zea mays
tgaaggcaagttggtacatgttattggtttgctaataatcatcagccattaagcacatgtaccaagtttttttttgttggttcttattgagtagtatatttcaacagaagcataatgctatggagcacggtgggcggatgtctcgttctctgaggaatgctgcacttgaggtgtgaacttggttctagtattttcgtttcccattatggttttcctctgctcttggtaaaatattcactatatttttgtggttaatttatttggtccatttagactaagttttctaatttgccactttcagacacctagcaacttaatatatcacagaaatgagcaagaacaacggcgtggcaagggtcataatgctttccatgatcaatctgactgccatatctcatcatctgcaaatgctttccatgatcgatctcactgtcatatctcatcatctgcaaatgctttccatgataaatctgactgccatatcccatcaactgcacaaaaagaccgggca

SEQ ID NO: 10258 - DNA, 439 bp, Zea mays
tgctttctgtaatcaattggggcgtcgtccgcgtccacgaacagctccgactccgcgcgctgccactccatcgatgggtcccgtcaccgccagatagtccacacgtcaatcacgagtcacgacacgaccctgtcggctcaggatcaaacgtcgttgggtcgctgctccctcttcctcgctctatcacgaagaacacgcgatgaacacaggttttaatttggcgcagcacagagaattggtcataggataatctgttgggcagggcatttttttccgtttacagtgttgtgtgatgagtagtgggccggggcttagttctcggacaagctgtccacgtcccttggctgtgggatggcgcagcgaatttgagggcgtgggcgcatgcatccgtgagcttcttctctgtaacaataaaggcagaaggaaactagaaaatgca

SEQ ID NO: 10259 - DNA, 613 bp, Zea mays
tgcatactttactacgtggccgaaatatctgcggccgcgctggatggcatgggactgactcaccgctccgtgctgtgtgcgcgccagagccaccccactgcgtggagttcagtcagtgcagtccagtgcagtgcaacgctccccgcgcaagcgcccggccggtgcctcatgcactgcacttgagtgacagcgcacacgcaccgagtgacgaacgcaacaacattacaacaacaacaaaaaagcggctgggtttgggcgtttggcgcacgtgctcgtgcgtcgcgggaccagcgacagcgacggcgacgggcgcacgggccctcccggtcgagtcgggacaagcgaggcccatgcctccccgcgccttttgtgcgacgcctttcgtctcggcgccacgcgcgcaacgcaggtcgcgctcgggcgctggtttattattactcgacttttttttttaaataaaaaaatgtttcgacgcggacgggtgcggtgcgcgtgggcagaaaccggagagcgcgtttgggcaccggcgcgctgggccatgtggtgtggaggcggaagcgacggagacggacggacggacagacgaagcagctcagcaggggtaccgagctcg

SEQ ID NO: 10260 - DNA, 1063 bp, Zea mays
tgtcggtgctgacagggtgaaaatgtggccaggacctgtgccgtgccggccggccggcggcgacgccggcgtggggcgtgctgtatgtccgctgctgccttgcctgtttgaaatggcgtcgtgcgcttggaatcgagatcgagtcaaatgagtactgcttggcatcgccgtccataagttactgttcgttgcatcggtctggcatgtttggatgtttcgaatgctgctgctccgcttcacttcccctgtccgggctctggactttttggcacaggggaaaacgaagaagggagacctagcttgttgctccgcataagtcccgatctctgaccgtgtcagcaagacaacatgcgaatggaaataggacatgtcgaatgttcaagagatctcaatgttcattgtggaagcccgttgtctgccacggagcacatcagtgcatcacattcgatcaaccagtccagtcgcgtgctctgaccaaaagaacactatcgaggtccgtggaaattggaatccattcgatcacatggggctgttggctccagattaaagacagctgcttcacgatgtccatcaccttgctcaccgtctccgccttcgcctgcgtacgtgcgtgcgcatacaacaacacagttggatcagataaagaaaagggggttcgtaattgggcccttgcacttgcacttgcagcggccacgttaccgcgtagacgcgaaaccgaggggatcgtcgtcttagggagacgaggcctcttcgggtggtggacatggagaccacaatccggcctggtactcctccgcttccctgcagggttcaaattaaaacaggtagagaataagattcggcaaagaaggcaccccaattacgaagcagcagcaacacgaggaataatgtaatatgcgtcttcggtacaacttgaattcatatatgatttcatatgcagtgctgtagatatgtaaaaccagtgaaaattttcagtatttaccttccagctcagggttggtgccttgcagtagccgacgttggcagagatggcggacaaggtggccattggagcagccctgca

SEQ ID NO: 10261 - DNA, 490 bp, Zea mays
tccgagctcggtacccctgaagctatagctgctgctgctggggagtggagagtgagtgagtgggaatcttctgcagcttctgcttcttctccttgcttgtgtacaaataaaaatcccaacttcaacttgtcatggcctccttttcagacttgttattatacctgacgtcctcgttggtgcctgggtcacatcacaccaccaacggggtgccattttgtgtaaaagaaatttacagtcacttattagcttgctaagattgttgacaaaatatatagtatttctttggaaaaaaaaaacagcagcaaaagtaactgacagaaacaggttggcaattagctagcaagctgctgctgctgatcatctgggagttcttttacggcctcgtcgacatgcaaccgcgatcgacgagaggtccgtccaccaccaattccattcttcttctcttctcatctctagcactagcacaaagattgcattgcattgcattgca

SEQ ID NO: 10262 - DNA, 431 bp, Zea mays
tgtatttctgttatgcaaataatagaaatgaggatcgcctctgtcgggaaaaaaactagtgccactgtctgctcaacctgccgcgagctgctccatacggagctccttggtatttagtagatctgttcaggagtgaagaagcaattcaagatcttacttagctgtagttcaccattaagggatccattgccagactcagtgtgtggatcttcgaaagcggacctcgaacgtaacatagacttcatatattgcgtgaattcattatccatcttctttctataattgggatctttgtttgatgtcaaccctgtgattgctctctgcagaggcttacgattcgctggatccaaacggcaatatcactataaaatgggatatcatgcagtggactcctgacggatatgtcgtaagtagaattgcccactctaaca

SEQ ID NO: 10263 - DNA, 485 bp, Zea mays
tgtaaccaagttcaagctacatactactgttaccatggaattcctaataccccctcaagactgaaatccatccaaataaatgtagagaatgggtgcataaagaattgccagcgtcaactgatgctccaacaagttttcgattgtttagctgcaaatgattgatcgacggagtgatcaacaaatactaagcagctcaaccagagtgggagggagatatcaaggccaattattctcacaacagctaccaagattaaccaaactaaactatctccagcagactccttactcactccctatttcaaactcctctctccaaacagtgcatctagagtgcaaaacagtgttatacacgcacacggcgttgctggagttggcctaaacactaaggcacctcttatttgcaggaacttttcagatccacataaagcaaccagtccccagaccaccagattcagctctccaacgccaaatctactgaatcagca

SEQ ID NO: 10264 - DNA, 496 bp, Zea mays
tgcagctcttccgagcagcgactcccgttctcgtccacggcgcgctcttccgggcagcgaaggcgttttgccttttgcttcgaggccgctggatctgaagcgacgagtcgcgcaggggcacagcgactgcaacagcagcagcactgtaccggcgggttactacgagctggcaactggcaggcgcacgaacaggcgcgacgcgtccaaaagaaggaactgatgtgcagcacggcaaggtaccggcaggcaggcgtcgtgcgctgcagtaactgatgccggcctgcaccgcaccgcaccgcacggcctgatcggtctactccttcgccttttttcgctgcgtacaggctacagggtccctgccagccggctgggttgggacgtgcacatcagatcagcgcctagcttccgtcgtgggtgggggcaggcgtcggccggcccggaaccggaaccggcggagggaagggtgcggtggtggagcccccggccagcctcagca

SEQ ID NO: 10265 - DNA, 524 bp, Zea mays
tgtgtttgggttgatttcttcgtttgtcggtaaggaagcacggctggatgctggatcactcgggatggcggattgttccacgagtgcgttttttttttttgtgtgtgtgtgcgtgcttcgtgggatctcatcttagtgtataactgtatacgatgtgaccattcagcgatctaatctagatcagtcttgccgggatgtatagtggaatccctccatcattgcggttagctaagcatttgtttggtggatggtggctggtggctggcgggtttgtagtaatagctgttattttccaaatagattgggtctcaaccaactgaaaccccaccccctcgttaagtccgcctttccgtgtgctgagcgagtgaacaatgcccacttcgtgtgaacctctaattcagcttatactaggacatcagaattgctcggtttaggcctgaatacaccttttattacttgtttctgttggtggtcatcatgtatttaggtgtattcggtatgttcttccttggttgctaattcag

SEQ ID NO: 10266 - DNA, 558 bp, Zea mays
tgcttcttgtgtctgcataacaaaagcctatctcaaaatgagcagcttttcttgatgactagcataaattttttatcaaaatattgtatgtttcattgagaatttttcatagtaactataagcaggtatgcaaatactgacatagcggacagcttcacatggatggatgtatgtccataaatatgaaaatttagggcattaaattgttgcttagaaaatattatcctaaggtgttatgttacttggattggatcgtaagccactgaaaatgcttatggatttcaattttcaaaggaatgtatgtggcacagatacgtatatatggataaatgctgcaactggcataagaggctatgcacaactaagatgtaaatttcagccaaacagaactcaaccatgcgatgcgaatcaagaatagcgagaacaaagtgccacggacaggcgacgaagaggccaagagtgagttcacctgatcctgctgcgcctgttcttccaggactttaagcacgatactgtatgatccctcctccaggaacacccatccatctctcccgtaca

SEQ ID NO: 10267 - DNA, 463 bp, Zea mays
agacaccccaacactaacgacaaagaaactatcccacacggctttgagcttggaggaaggaaacccccttagctccagccaagaaccacagaagagcttcctccctggccaaccgaacggcttctgggccttttttgtttttatttttctgatttttgtttcaccggttcttttccgttttaggcataataaccaattacatgctctgatggaattctttgaccagagccaaaaaaaattctttagtcaccacaagtccaaatctgagtcggacggctgcaccccacgctgcatgtatatgccatataagtacctctgttggagcaatacacccaaaacttagctcacctagatgtagcagcagggttccttcatcttcatgctcgcgcgcacatgtatcatacgaggtgctccatgctcgcacatcctgcaggcgaagttgttatgctgcttggtgatgcag

SEQ ID NO: 10268 - DNA, 470 bp, Zea mays
aaaattatttgatgatagccctacttctgtatggttccttcttacatagtttttcccctttgtataataatcattgttcagatccaatcacttgttgacaaaatctcttatgaaactaaagtcaggtgacagtagcccagagagttctacaaattcaacaaaaaatgaaaataggaatgaaaaacacgaaacagctccaaaggaaaaaacatcaaagaagaaccggaagaaggagaaagaagtggcagagagtgttcctgtaaagcctaaaaaggaaaataggcctttggttctgccttttgaattatctgttatgggtattttattgctcatcgtattaggtggtttctatgtggtaagttctctgttgttagtcttaccagaatgaagacaatgaatgtcttcattgaatgaggtaatcttaatgttaatgattccatttttttaggtccattgtgtatgggcggcag

SEQ ID NO: 10269 - DNA, 516 bp, Zea mays
tgattaattccacatagatttcaagtctccgttttcttgggtcgtcagcttttgcaaggaagacgaagagcttgtatcgctggctgtccaagggttccattcctcccaggcattgtaccaacaggagctccagttcctcacgaggtgaatccatgcatagcgtgtctagctgattgtatatatatgtatctctctgcagccagtcctcctcagttcacgcgcgcagtacgtatatatccaacaagctaattaagacgattcgattctgttctgtgtataataattaataggtgggcgaaagaagcgagactgcatgacctcgagtttgcacgaatcatgccgatgaacacgttcttcccaaacgcggcactcatgtatgcccctgaactatccgaggctcgcatcctgtgcaccaagaattgcatgctggccaccgcagtcgacgacctgttcgacgtcggcggatcaagggaagagatggagaacctcgtcaggctgatcgacatgtacgcacca

SEQ ID NO: 10270 - DNA, 463 bp, Zea mays
tgcaaggacccaaggctggctgcgagcgccgagcagacgagcagtcactgatgtgggggtggggctctgggtcacagtcacagttactcctcctcgtcctcctccagcggtcctgctcttcaccatctaaacgaccggtccacgacagcggccacagcgctgcctcctgcagcggaacaagaaccaatggcgcccgtgtccaattacagtttaggacacaggaatcacgccatcacctcgcctctgcgccttgtctcgatggaccgaccgtacggtgatcccgaccgtaattttttttttaccctgcgttcagacgctcgcgccgtggctttaccgcaattttttttaatctctttgtctgtttgtctctgcggcagttaccctaccctacccgataggtctagctgtactggtactgcttgctacggctacagatacggagcaacaggcaacgaccgcatca

SEQ ID NO: 10271 - DNA, 546 bp, Zea mays
tgcttcttagtgctgctagtgccacacctcttcctgtcctcgtctcaccaggagtcggtggccgccatggatgtgccgtctccgtcttccctaccaccggacaagcagcaggtggccatcatgatgaatctctcaagcgctgtgggtagcagttgggcctcgggcacagacatgtgtaactggactggagtcgcctgctcacgctctacgtccggttcttacatggtcgtgaccaacatcactttgtccggctacggcatgtccgacgcctccgtcgtcttctcccccttatgccttcttgacaccttgctgtccctcgatctctcgatgaatttcttcaccgatctaggggacgaattatccgccgcttcttgccgcatgatgaaggaagggctggtgtcgctcaatctgagccacaaccatctcgacggttctatcccttcagatcttggatcctcaaaagacctagcgatccttgatctttcctacaacaacctgtccggtgcggttccaccttcgctatggagcctccagagcttgacgcag

SEQ ID NO: 10272 - DNA, 476 bp, Zea mays
aggctctggtttgtctccaacatctgcaagatagcaggtacaccaaacttgcttatattcgcttgctctcctccaaaactcaaaaccttcaatgtggtattggcttgtctctgaagtggagaaaaggtgctaagagggcatagcaaatgctccacccctactccaccaaatctatttccatccaaagtcaagttctctaaatagctgttcttaaagagccctgcagctatatacaccactgctttgtccccaagggaacacttgctgagcttcacagttttcaggctcctgttccgttcaaggactcctctaagctctttggtccatttggactttagtgggacacttgacatgtccagtgttgtcactgtggtattccatggcagagcacaagcaacccgttgcagccctgttgagctaatgttgctgtagatcttcatgctcccagtctcaggcaggaattcaacaattttaca

SEQ ID NO: 10273 - DNA, 490 bp, Zea mays
ttgaagtgccgccctgaagcgaaattcaggggggaccacgacagccttttggtcttagttatgcagtccactgacccacgagcagcagtgagaggcatcgtctcatgttccgggtctgtactctgcaatcatggacttgagggcaacgttcaggctcatttgatgatttattgtgccatttctgtttgggaaaatggcaccagtagttgggttctccttgtcaactgagaaaaagtatattatgtccgcgatacgatatatattttcacacaacataataacagaaactataatgttcaactggtttgagagatgcatcagaaactaccacagtttgtgtcaagcacataaaactttggaaattacctcaccacaccattttggcacagacgtgttgtcattatgaagcaaatggtccaccagatagcggagcggccctgtcctcaccaccactggctacctctgctatgccggcagccaccgtgcagca

SEQ ID NO: 10274 - DNA, 558 bp, Zea mays
tggtccttcgtgctctacggcctccttgtgaagcatgggatggaatatgtcaatgatctcttcgttgtcagctcggccatcgtgatgttctctgaactcggggatgtgcagtcagcttggagggtgtttgagtatgctgccaagaagaacaccgaggtttggaacacgatgatcactgggtatgtgcagaacgggaaatttgctgaagctatgggtctcgttatccggttaatggtgtctaaagaggttccattggatgtcgtgaccttcttgtcagcactcacggcagcatcacagtcccaggatggcaggttgggtcagcaactgcatggctacttgatcaaaggaatgcacaccactttgccagtgatacttggtaatgcacttgttgtaatgtactcgagatgtggcaatgtccaaactgcctttgagctctttgatcggttacatgagaaggacattgtttcttggaacaccatgatcactgcttttgtgcagaacgattttgatctggaaggcctgttgctcgtttatcagatgcaaaaatcaggttttgca

SEQ ID NO: 10275 - DNA, 486 bp, Zea mays
acccctgcgtccggcaccctcgatcacctgaagtcgccgcctttcgcgcgtccggctgcccggaaccccgcctcctatccatgggatcgattcggaggttagggtttgctctcccactccgtccgtcttggttcgtcgtcaaggcgtggtttttacggctcgcaagattggattaccgaattagtttaggctagggtgggtttcttcatctgaactctgatgtgtccattgtggtggtaagagatgtccatttcattagattgaggtagctatcaccactgttatatgattgctcgtccgcatgatttcattggatacaagagctaattgttaactagctaaaattagttctaagtaggtgggctaacttttttaaccaagccttcaactagtcgttagccaaccatagctaatttgagctatttcttggcccaattagtaactagccctagatcacccaaacaggcccttatgtcaaattgttca

SEQ ID NO: 10276 - DNA, 495 bp, Zea mays
tggtaggtgtggcaaagcagcctctttttgctactctgcgtccgcggcctgacctcgtacagctcggcggcgtcggccggcagcgggagccgcctcttccggaaggcggcgacgaggacctggagcagcggcgtgagcgggctgctgcccccgggcaccctgtagcgataggaccggcgcccagcgaggaagacggcgagcgaggcggccatgacggcggcgatcgcgacggtggcggcaccccagccgacgcggtcctgcgcgtagactatggcggtgacgccgagcaggacgcccgagcagagcgcgcagttccaccagttgaagaaggacatcttctgcacgcgctccgccgggtgggcctcgtcgaactggtccgcgccgaagctctccagcgccggcttgtggccgcccgtgccgatggacaccaggtagatgccggcgaagaagagcgcctcgtgcaggcgaggcgagcgggcgggccccagccgcggc

SEQ ID NO: 10277 - DNA, 434 bp, Zea mays
tgttaagagcacaaacatacacccaaaaacttcttcagatcatgccccattgcgatctcacggaacaagtgaagcgctctgttgatgtcattccgtaatgcccgtgaaacattcacaacaaggtcctcagatacctgcactactggaatatctggtggactcctgcagaggcaacacatggacgcaaataagatagatttctacttaaaatggaacatgttgaggatcatcctatgtcccaatgcaatactcacttcttgatgaacgtggttgctttggaccacaggaataaggtggcaagcacaccaatcagtacatgggatatcagggtcaggaggtggtaatcaagcacttcgaacagaacccagatgacagttgcgccgcctattacaacagcagaagttttcttgtctttccataagagaacgtcagca

SEQ ID NO: 10278 - DNA, 450 bp, Zea mays
tggtaattacaacacaagtggataggacagtaatacaacttatacaagtgcagaacacaatttataaataaaggacaacacaagcttccaacacaagtgacttcttctgactcctctccaaccctagatacattcacttcctctctaagttctagctcacgaacagtcttctcctccctcttcctttttgcagcctctattgctttcttgcacttctctttagcctctagagcctgcggtgttgcagacgtgcatttcttcacattctttccaacatgggcaagatgctccttcaacctataaatccctcccctcatctccttgtcacagaacttacacttcaccttgtctttgttgttagcatcaacaagaacaccatattcccatccaacatcatctgaatttctttttaggagattcgctctagctgcttcagtttcagaaggtgca

SEQ ID NO: 10279 - DNA, 489 bp, Zea mays
tgcacccggagccgcgccccgcggagcaccctgcgcccgttcctcaacaaggacccccgctcgtcggcctcctccgccaccagcacgcccgccaggcccgccgcgcccgggctaccgccggagcggagcggggtcctggacagcagctcgggcgcggaggcggcggggctcgtcgtcatcgcggactccgcgaagaggctcgggagtgacctcgtggagaggagccgagaggccggcctaccggtgccgccctcggtgaccttggctgtgggactgggacgcgaggcgggcgctgcgggatcgccgcgccccgtcgcggccgcagctcttcctgctgccgcttttttcagcattgcgggcaagaaaccggagcccgagcctctgatccgaccaacttcagccgagcgcccgagcctgatcgacccgatcgatctacgcagagtagctagctagaaacagcaagatgtgtgggacgaaacggtcagctca

SEQ ID NO: 10280 - DNA, 466 bp, Zea mays
tgcaaatgcacttctccatgcaattggattgtccaccttgccccgcccaagcaccgaatcctcaattcttggctgaatcaggaacttctcaatcttgcaggcagaatcagcatcaatgccagcagcatcaagcgaatcaaggaggaacatgcaagactgaaagcagtttaagaagtactgtgagaagggaagatcagcgcgatcagcgccatggtctatggctatcacaatcttaggagctagctgtttcaccaacccaaggatcgctggcagtggtggtgcacgagcagagcaaccagtcgggaggacaacaactacatcttcatcatcagtggcagaaatgaattctgcagggttgatcatatcagcactgatagcactgaactcaaagggaattccaaggtcagcagcaaactgtgcaatgttgtcacgcgcaagacacagctccagtggatggtgggaagca

SEQ ID NO: 10281 - DNA, 478 bp, Zea mays
tgatagttagtaggcacacaataggcatcaaactgtcttgtacatatgctcgataggacccagaattaggcaaggacatacaactagcttctggaatgctgagatgaaagatcatttggaaaaaccagaataatttatttaacatcacaaaagggtagacccagtgccgaaggctaccatgatgagtggggactggggaaggaataacaagccttcccccacaaatacggagaggctgtttcgaacccacaacctggtgactcagtgagacagctctcaccactgcaccatacctgcccttcttatttaacatcacagtatgccatatttcatcacactggtcaaattaagggacagcaaatgttattgcagaagaagaatgtaaacaagtaacagaatgtctataattttcaggaagcagccacaaggctggcctagagaaagttcttggagtttaggggaaaaatacagtggttca

SEQ ID NO: 10282 - DNA, 509 bp, Zea mays
gttatatagtacatgggatgcatgatccatgaaccatgatacatagactgatagtacactcagttactttttagataggcatgagtacttgtgtccatgatttaactgtttcttgcattttatattatgagctttgcaggttagccagattaaggataaaatctctgcgaaaggacaacacattgcagatttgcagaagaaagctcaggtgatctctgtcatggttttcaaaggattctgctgtcctcacctgccacattcctatatgagatagcccctgtttggccatctcgtagaatctcattcggggtgagttctgatgataagtaaaaaaaaaaaacaatttccgcatcaaactgcagaaattagaggacgaactggctgctgcacggaaagtctcttcagaacgacaattagctgttacagacgtacgcgctcatcacctgttggctgcttgttcatgcaaatatgcaattggtggcttctctgatgaaagaattataaatgca

SEQ ID NO: 10283 - DNA, 522 bp, Zea mays
tgaagttatactgtacatgggatccacgatccaagaaccatgatagactgatagtgtactcagctactttttatatagccatgggtgacttttgttcatgaattaactgttctttgtgtttttatattatgagctttgcagattaaccagattaaggataaaatatctgggaaagaacagcacattgcagatttgcagaagaaagctcaggtgatctatgtcatgattttcaaaggattctgctgtcttcatttgcaccgttagtatatgagatagccactgtttggccatctcttagtctcatttgggacgatgagttctgatgacaagtcaaatgaaacatttttcgtgtcaaactgcagaaactagaggatgaactggttgccgcacggaaagtctcttcagaacgacagttggcggttacagacgtatgtgctcttcacttgttgactgcttatttatgcaagatgcggttggagtcctgcaatgcccttttctgattaaaaacgttgtatatgtgca

SEQ ID NO: 10284 - DNA, 510 bp, Zea mays
gttatatagtacatgggatgcatgatccatgaaccatgatacatagactgatagtacactcagttactttttagataggcatgagtacttgtgtccatgatttaactgtttcttgcattttatattatgagctttgcaggttagccagattaaggataaaatctctgcgaaaggacaacacattgcagatttgcagaagaaagctcaggtgatctctgtcatggttttcaaaggattctgctgtcctcacctgccacattcctatatgagatagcccctgttttgccatctcgtagaatctcattcggggtgagttctgatgataagtaaaaaaaaaaaacaatttccgcatcaaactgcagaaattagaggatgaactggctgctgcacggaaagtctcttcagaacgacaattagctgttacagacgtacgcgctcatcatctgttggctgcttattcatgcaaatatgcaattggtggcttctctgatgaaagaattataaatgcag

SEQ ID NO: 10285 - DNA, 475 bp, Zea mays
tgaggatgctggaatggatccggtatagttttctctgtgttaattaaaatgcattttagtattgcacctaaagggaagggttgcattgttgtgctccacagcaaccacttcatttcaattgaacaaatgctgatatcatgatgctcaaatgtttgggcctattcatttggacatccctaatgctctggattgtcagaatggtgctgcttttgtgtatgtcattacaaatcagaacatgctgacagccagaaatgcagaactgatagtaagtcatcattttcttgtatatctgctaactgaaccttgtttgttctccagggatctgttcccagacaatgcaaaaatttatgtagaaaatgatgcagtggcggccctggctagtggtacaatgggaaagctgcatggttgtgtgttaattgcgggcactggatgcattgcttatggagttacagaagatggaaaagtagcaagagca

SEQ ID NO: 10286 - DNA, 470 bp, Zea mays
tgattctattgattgcagttttatattgtgatgttgtggaggcatatgagtaccatttttttttcttcttaatatagcactagtgttctgataggcgcaggaaatcaacagctcgtgcagatgggtttcttcgagcaccctctcttgtcgacaaccttgttatattttagaagttatttgtttgacatccatccatccatcttctctccaaatttaggtcggatgtacgagctctatcgacgttatatttgtgcctccgcgagtccgagctgacccagcagcgagtcaggtaccagcagtagagttgtttgttttgtcgtcccatactgaaaatctatcatctatgcacatctcttgcctgatccccctttcgccttctgtatcgtggttcagaatccagcagttgttgccaggaggatggttctgaagtcaccacgcctaaggatcaaaaggcatgtcgtagtggcaca

SEQ ID NO: 10287 - DNA, 532 bp, Zea mays
tgagctggcctgcagtggtgggatctaccgtatcatctgtctgggatccacatgcctatactgccttgcgcctgtccactgacgtcccttcgggtatcgtctcgtttcgtttcgtttcgatgtgtggccgtgtcaaaggcattggccgttccctaatctcgtttccagatatcgtcaaaacgacacgactgctcggtgattgagtgtgacattgacggcccttgtctgttttctggacggcggtgcgagcaggactacaacgtgaccgtcgtgtactacctgacgcactacctggtggacctcgtgacggagccgcccaccggccggcgcgtcctcaagctggactccatcgaccaggcccgcgactggctcgccgccgatgtgctcgtcttcgactcctggcactggtggccgcgcaccggcgccacgcagccgtgagtgagatcaccgttcctccctcccttccttctctgcctcgggtaggcacggtgtcagaggctgaaactgggtttgttcatgtcctgtgcttgca

SEQ ID NO: 10288 - DNA, 538 bp, Zea mays
gtacccctggcctccaaggtatactgttggcccagacgacttcaggaatctgaggttatgcaaagtgggcacaacgttcgagtttcgtaagggcgccatgccaaggctcgaagtgctgcaatttggagtttttgcagggtactggagttgggaagagaatggtgtgccgttcgagcagttcccaacgaaggatgtgatcgaagatcttcacttggacctggataacgtccttttacttcagcaagtaatagtcaaagtcaactgcttaggtgctactgccgcagaagtggaggaggtggaggccgtggtcatgcgtgccgtggaaaatcatgccaaccgtccaaccataaaaatggatcgagcatatgaagaaaatatcttatctgatgaaaagctggaggctctggtgagtctctgttctcttcgagtctgctaaagaaaatacgctgtgttaattatatatgttcatgggtactactatctcacctctatgtttgtgtacttctcagaacataaacctaaaaggcggcgtgctcca

SEQ ID NO: 10289 - DNA, 519 bp, Zea mays
tgaccgtgtgctcgctcctttttctcttccccaaccgtgcccgagccctcgcgctcccgccccctccgggggccgctgcggtggttgaggcgacgcaggaggaggaggaggaggaccaggagtgggaggctgcgctgcagaagtggaagaccaagacctacgcgctctcggtgcccctccgggtcgtcgcgctccgcggctccttccctccatcttggattaaggtctggtcgccttcatccaccataaacaaagcatgattgcataaatttgtgtgagcaaggaaggtgtatggccagggtcgctgatccctggaattctttaaaagaaaaatgaatggtgggtggtgggcaatttagtgagattttttgtgtgtgtgtgtgtgtgtaggatttcgtcgaagctcaggggaagagactcaaattcagtcctgagctccgtgctaatcttgatgggatcttctctgagatgtcacaatgtatggacaagggtcaagttcagccgaagtctgcaatggca

SEQ ID NO: 10290 - DNA, 505 bp, Zea mays
tgttgaagaagcccaacgagccattaattccgcatatatagaggtaggctgatcatacttgctatgcaggctgttctgtagttgacattgtttagagatacaaaggtttatagaaagatgctgcatggagatgatctttgttttatttatgatgacactctttttaggcacgtagtgcttaccatggtattggcttggtcaaattaatgggaagaagcagcgggtttattgcaatgcacgcttccctttcaagtgggcaggtcgatgtctgcttaatacctgaggtaatataaatgtagcttttactatgtttaaaactgccatatgttttcctctcacatgtaagcgctaacagaagcttacaagttacaatatgaatgaaggtcccgttcactctagatggagaatttggtgttttgcggcaacttgagcatttgctaaagagtaagggattttgtgtggtttgtgttgcagaagctgctggacaagtatgctaaaattcaca

SEQ ID NO: 10291 - DNA, 463 bp, Zea mays
gggtaatctgggagaggaagatggcaggcaccacgcgcactagtatctatatactcccagctacgaggagatcggcgaagctgccaggaagctgcgcgcagctattttgaggcgatcggggcgttgcttgcccaggagtttattagctgttgcaaacaaacgttggttcaagggaagctgcaagggaagttgtaaagcttttgtgaattgtgaacgaacgagacaattccagctcaactttggcgaaatttgtaagtagtagaagtatacataacattggccatttgatgggctgctgctgctaattggtttcgacgcgcgctgttcgccagcaggcccaggctggcttggcggggcgacgcggggcgtacgcgaggacgatggatgcgcgtacggacccattttgcttgtggagcgcacgtccatggccgaccacagcccaccgccaccggcccaccgccca

SEQ ID NO: 10292 - DNA, 461 bp, Zea mays
tgctcgccgccggcgtcgatgtagcgcccgtccaccgacacggcgagccttgcggaggcggaggtggaggaggcgttggtggtggcggtctcgtcgcgccctgcagctactgctagcgacgccatgtcgacgacgacgccgccgggggccgtggcctggccccgggtcgagtgcccgcggcccctcgcggagaccgggaacggcgaggcgctcgcgctggacgcccgcagcagcgcggcgatgtcggcggcgcacgacgggtagaacacggccgccggccgggccgcgtcgtccgcggtcgcgttggtgccgaagtcggtggacgcgcgcgccgtggcctcggcgtccgtgcggacgcgcgccgccgtggtgtccgcgaggccgcggatgatgtcgtggatgatggcggaggatgacgacgtggaggacgcggcgagcgtggaaggggtcgcggagacgca

SEQ ID NO: 10293 - DNA, 480 bp, Zea mays
atgattgattctggctgccaactgtaagcaatcaaacagaggggcaagtcaagcctgtaagtgaaaaacaacatggtaagatgagacagacaagagatgatttagttgagttaccctgctgctgtggagaagcggtagccgtagtgatgggttcaggatcctgcaagccaagcagaagagagcagacagagaggcggcgtaacgtatgataagaaggcacgggcatgggtggatgaagacggtgatggaaggaggatgcttcttcgtcttacagggactcttcgtagggcctcgtcgatctcctgtgtggtgaggcccttcttctcgaggaaggatcgtctgtagacgacgggggagcccctgacctttgggtgggagaggaacttgacggcgttctcgacgtagtcctccctcacgggctgcggctgcagcggcgtctcgaagacgagcttgttgtcgccggctcccgggtcagcatca

SEQ ID NO: 10294 - DNA, 548 bp, Zea mays
tgtagcaggctgtaggtatacacttgaatcacgacgcggcagagcggccgtcgagccagggcaaaaataataagaatagcacacggaggggtcccagcaaaaacacatataaatatatatatatatatatctgcaaccaggaaactgcgcctatctatcaaaccttcgctctgcatgatccgcatcacttttgcgtcacaggaaatagtcaggtgtcctacgagttacatctggctctccccttcttggggctggctcaaactgcagaatcacacaacaccagaacattaagatgccacagtaagtcagtaaccatgaagcgagatagcagaggaagcaacaaaaatatcaaagctaccctgacagacacactgccgaagggcaaatctcaaggtcatcagaaccgtgttgcgcctatcaacatcatcaattctattattttgtcccacttgaagtgagggtgacattttcttttcttgtaatttgggtaaaaaaaagagcactgggtctataaattatcaaaaaaacctgcctgctcagacagacca

SEQ ID NO: 10295 - DNA, 524 bp, Zea mays
tgcagtcgttgaacctggctgctgtgatagcatcactgacaagggagtcaccagcttggcttcaggatgtcctgagctcagggctgtggacttgtgcccctgtgtccttataacaggtgacctttccctttacgtgtctcgagttctgcaaaactacactgaaacttagctgcctaatttttgccctcacacttgtttgatccactgctgcagattagagcgtggttgcgctggcaaacggctgccctcgcctgcgctccctgggatttacacggcagtttactggagatggccaatatataagcaaagagaatgccaataacaaaatctgtatgatgaatttttttgtagaactagactaagcaaaaaataaagaaaagagaagagaacaatagaaaatattcacaacttggtccatatgaagtgaactttacttgatccatcgatttgccactaacaaaaaaaagctaaaacagctacaccaatctactatatacatgtccacatatctaccttaatggcca

SEQ ID NO: 10296 - DNA, 557 bp, Zea mays
tggaattgaaggcggcctgctgctgcgccttgagcggctcgcccacgtcgccgtcgtcgtggcagctcgcgtcccagaagctctgcaaaggacacgccagggggttggtttggtgagcaagtgctagctagcactagcagagtaaattcatagctggctgctctgctactgctactgctaatgccaggaggtatggtatggacatggtctgctgtttcacccgacgcaccaggagaaggtcgtccagctcgccggggatcgcggcggccacgtcgtgcgccgacggcggcagcgcgggcagcgccggctccatgcctgtggcgactgcaaagccaggaacaaccgatcgacggggatcatcatcaacaatccgggccaaggattgaaggtcgcgagcgcgcatgcatgcgacacgtacagagcgggaagaggtcgtggacgtcggcggtgaggagcccgaagcagccgaacggcgccggcgctagctgctcccacccgagcacgaagcagtcgccgccgccgccgccactgccactgctgttgtagttgtcgaagca

SEQ ID NO: 10297 - DNA, 468 bp, Zea mays
tgaggatgttgggagcgataaatctctgtggcaagattggtgagcatagtgggctaaaactgagaaactcttttcctccacccaaatttatcaaaatcactgtagaaaaacctacaaatctaatcataaaagatggagtgtttgcacccaaaaacccacgtcaaaaacaagtgtggataccaaagcgtaaccacttgaaaatttctttggacacacttctaccgtaggtggatcaacttcagagttcagagggtagcagacagtggcctgtatttcgatctgtattcatcttgtcatatgtcaaaacaggtatgtggatcaactttcagggagagtactcttgacttgagatatacaattgatggctatggataaccagcaacaaatcttgagaaaaaaatattttagacagcctaatgctaaactctgggtggtaaatctctacaggaacaggttttctttttggca

SEQ ID NO: 10298 - DNA, 505 bp, Zea mays
tgttgagtcgttggccatgcaagctgagctgagatctgggaactggatgtaatataatgcaaacaccgacacgggtcggctaataatcctggcactaacaacaatgaatggcacatgagatgagattgggagtataagctagcaactagcatgatcgagctgacgctttcaatcctgttcttcaaacaaactctgcgcgtgttgaccaagtgcagaatcgaggcctccatcaagtccccagacgggaatcgcggcactccccagactctacatcgtcttctccagctagcagtagcagatgccatggttgacggaaactggcgataacctagaaaaaactaggccgtcaagcattccaatgcccttccagtcagatactcagatctgaagcatcaaccagctagctagctagcggcgcactgcaatatatatataagcactcgatcgcacagtcacagcagcagccagcagtcaccaaaccatcccgcccagctctacccaagat

SEQ ID NO: 10299 - DNA, 447 bp, Zea mays
tgatttgttccttcgttttaacattgttcgtcgcccagatcgctgcgttgctgctggagaacggagcggacgtgaacggcaggaacatctacggccaggtaattaattgcaggtcaaaccaaccagcagtggaggaggattgcagatggtcgatctcacactcacgtttctccttgtttaatttggtcaccatcgactgcgcatgcagacggcgctgatgcaggcgtgccggttcggccactgggaggtggttcagacgctgctgctgttcagatgcaacgtgagtagcaagctagctagcgccatcccttgtttttttccagcgcagtgcaagtgcaaccgaccgacgagcggtggtggttatctgtttcgattcaaggtgtccaaggcggacagcctgagcggcaggacggcgctgcacgtggcggcggcgggcggccacgtcag

SEQ ID NO: 10300 - DNA, 511 bp, Zea mays
tggagacgctcagcatcatcgagatgccgggcctgggcgggcgcatcccggactccttctgcaacctccggcacctctcactattcaacctcatggtcacctccgtgtcgggccccatcccggcgtgcctctcccgcaccaacctcacctccgccagcttcttccgcagcaagctcaacggcaccatccccgggtcgctctggaagctcccgtacttcacctacttcaacgccgcctacaacaacctcttcgggcccatcccgccgctgctggtgcacggcggcacgcccgaccggccgctgggcctgatgctggacggcaaccggctcagcggacctatcccctggactttcgcgctcgagaggcacctgctgcagttcagggtggccaacaacaagctcaccggcgacccgtcgttcctcttcgggcggcgcaagacggtgaccggcaccatcgacctgtccgggaacaatttccggttcaacctcaccggcgtggagatgcccatgca

SEQ ID NO: 10301 - DNA, 483 bp, Zea mays
ctgaactctatgatgtgaattccaaacaggacctaactctgtgatgtgaaattgaaatcaaagtgccgactgccaatggacaggactggtaaagagttttattgggatcccatctattttaggtagttgatcaaggttaagctgcactttggtgacccaagcagccctactaaatttggtaaatttggtggtagttaatgaatggcaagatcattgaactcaaaagcttatctcagacatgacaactcaaaagcttaccttgaacacgagtaccaatcagaatcggtacaagatggttacctagagagaactataaaacgactaaattaccacataaatagggaaacgcaccaccgaactgcactctactcaaggtaaagacagtagcagcatcatggaaaggttgccaaacatgcatcaggagccactcgcgaaccaaaaaccttttccccactccatgacacaaatcaagaaacggtaaca

SEQ ID NO: 10302 - DNA, 486 bp, Zea mays
tgcctgcctcgccacctacgccgtcgccgttcgcagggaccccgggcgggtgcccccgggtttcgtgcccgacgtcgaggacgccgagagcaccgtccacgagatcaagcgcaaggtgcgttggcgtggcgttgtctctctctcccttgctcgcctgcggttcgacgggcgggtttccgttcgctgttaggtgttagggttgttttggatctgcgggtgggagagaggggcctgctgcttcaaaatttactaccgttcgtttcaaacttgggggccttcctcaaagcttagaaaatgcgattctgatgcagcttggttagtatttttttggataattttggtacatatctttgattctaaatttgacaccgttcatttgaaacttaggaaacttattcaaagtcgagcaaatgcgattcagatgtacctttggttgataattttggaccattttgggtacatatagttctgctctagaattttcca

SEQ ID NO: 10303 - DNA, 513 bp, Zea mays
tgacaccatctgctggcttgttaacaacgatatggcgtcgcaggttcatgtcgtcggacaagggtaagcaaaagcagcagccgcagccatttcttactcgtccccgcatttggttagacacagaatcttcaccttcttggctttggccaccccatcgtcttgctctttgtttggttcgtcctcggattcatggcggccgtgtgtatgttttgttttggcaggatcgtgggccgtgccgcgttcagtggcaatcaccaatggatcgtccacggtactgccaatggtcacgggctctcctccgaggtacgtacggccagtaccgagtgcttccccttctgaaatctccagcgaaataaatgcgaacccaatttctcagttttgtctggttccattttgctgccacctcatctgtcagttctccttcagtccttcaacttttgtccgttagcgagctgctttatatattttggtctgctcgcactggaccaaaaacagtggcaaatgacgcaagca

SEQ ID NO: 10304 - DNA, 545 bp, Zea mays
tggctcagcaggatgtagttgttgatgtaggggaagagcgacaggtgctccagcgggttgtcgaaggaggccagcaggtcggagtagtgcgcctccagcagcgcctccgcgtcggcgcagaggcggatcaggccgccgcgcatctcctgcagctccgggcccagccgctccacgtccacgctgctgcgcgggatgcacgccgtcacgagctcggtgaagagcgcgttcacctccggcgacgggctcagggatggcagcttcgcgatggcggcggccaggctggagatcttgtgcaccagcgccgcctcggcctccttgtcctcctccgacggcaccggcaccaccgtctcttggacgacttgcacttcttcttggacgaccttcccttgcacctcctcctcctcgtgttgctgctccttgcccatgacgaccatgactgttgagtgtggaggcgtaaggcgttgcaagctcgacggttgcttttgcttcgttttggaagactggagtggccgacctgatgccgcatatatatagatgagatggca

SEQ ID NO: 10305 - DNA, 493 bp, Zea mays
tgaaccggaccacaccaccaaagaggtagtgctactgtttggatggctgcactgcacttgattgattggcagcttaggattgtggttgtgggtggtgattgctccactgcggaccttactgaattatgctttttgatcgacggtgttggcaatccagtcgtatgtcgtatacatggggagcccgtcgggcggcggcgacccggaggcggtgcaggcggctcacctgcagatgctgtcgtccatcgtcccgagcgacgagcaggggagggtggcgctgacgcatagctaccaccacgcgttcgagggcttcgccgccgcgctcaccgacaaggaggccgccgcgctctccggtgaggctacggactcccgatcgaccgattgccagtgatcgtgcgaaggccagcaacgatggcgacctgacctgttagttacttgtcgcgttctttgcagggcacgagagggtggtgtccgtgttcaaggaccgagccctgca

SEQ ID NO: 10306 - DNA, 523 bp, Zea mays
tggtgttggctgtgtcttgtgctgaggcggcgaacgctgacggcggccggcccatgggcgtggcggtgcggccggagcaacgtcaccatcctctcatgcctccccctctccggtggcccgcggccgacacaagagcaggaggaggaaggtgcaggcagaggaaggagaaaaagttccaaggagcaaggcgggtgcctttcatataaggtaaggtagacaatgaattattatgtatagtagtatatacatccatccactaatttctccctctcttgtgccgcgtgctggaggctggagcagagagaaggtaaggtgtcgtgggcgtcgcgcacagtgcctctctctctctctctctctctctctctctctctgcaaaagtgcgttacatatgcatgcatgctgaggtcatcccatgccatgcactaaccgcgtgtatgacgttggccccgtttgtcagaaaagtccataaagaaaaactggaccaaacaagccggttgactagtttacttttgcaatccttaca

SEQ ID NO: 10307 - DNA, 544 bp, Zea mays
tgccccgtgtcggtgtatatattcgacatgagcacgtagtatcccacgttcctcggctccagctcgacgacgcgcgcaaaggcctcctccccaatctccacgtttttgtgtatcttgcacgcaccaagaagggcaccccagacggcaccgtcggcaggcatgggcatcgatgagatgagctctcgagcctcctccaggcggccagcacgtccgaggaggtccacaatgcaggtgtagtgctccagtgtgggccgcagcttgtagacgctctccattgttgagaagtacatgcgcccctcgtcgtacaacccggcgtggctgcatgcggagaggacgccgaccattgccacgttgtccgggtggatgccttcggacaccatcctttcgaagaggctgacggcgacgccaccatttccgtgcatgccgtgcccagtaatcagcgccgtccatgacacgatgcttttcgcgggcatttcgtcgaacagttgctgcgctcggggcaggctaccgcagcgcgcatggaagttgattagcgcgttgcaca

SEQ ID NO: 10308 - DNA, 493 bp, Zea mays
tgcgtcgtccctcccccgtcgtcctcagagtcggcggagacgccgtcggtgccatgctctctctcactctgcaccacaggctgatggtcaccaccatcacaggcacaggcacaggcacaggctgcagcctgtgggtgcccctcgccgccgccggctgctgcctaccagtaccagggctgcggacgacgacgcggcagagacgtcagcgtcagcatggccgccgcccagacactgcggacgccgactgctcatcgtcgtcctctggcttcatcactatcgagaaaggcaccatctccagacggcgcccgccgtccgactacctgctcaccaccgacgacgacgagcgagatggacaagaacagcaagcggccgggccgcccccaaccacgacaacgcccacctgctgctggtccttggacgacgatgacgacaccaaggtggaagacgacttcttggccatgctagtgctagaatacgacgacggcggggacca

SEQ ID NO: 10309 - DNA, 520 bp, Zea mays
ttcgagctcggtacccctgccctctgcacaggacagcagcacaagtgtcagcaggccgcacacccacacaacttctcttcactaagcccccaatagaacccttgatctgaaaattgcagcaccaggacccaaagcctcaagatgtctagcaccggcaagcctccaacactcaaactcatccagaaaaactgattttattccctgaaaagaaggcctgacgtcatcaaaaaccgccttattacgatgcagccataaacaccaagcccccaagatgatgatactgttaaagcctcttcttttggatttgtgcacttgcttacacaccttctcccaccagtcagcaaaattggactcattagaggcaggagaaagattagccagccccaaggaagagagaatgtagaaccaaaattgccgcgcaaaaatgcaagtgcaaaggaggtgttggatattctccgaatcttgatcacataaaggacaaacctcaggataagccaaccctcttttctgcagtctatca

SEQ ID NO: 10310 - DNA, 545 bp, Zea mays
tgagaaggtaatagtttctctcacgaatcacgatcatttcattctagttcgctttgcctttgggctccctcgttgacatatttcgcatcgccacaggctcaggagctcatgttcttagccagcagaggatctattccaagctcagcccccgtggcctgtaagccagaggctcctcctactctcgctccagcgaaggtcacagcgccagaggttcttctgcctgcgaagcagatgctgtttcaaaaaccacagcatctctcgccgcctccatccagtgtccctggcatcttgcagtctgcagctctccccaggagcgcctcgtctagctctaaccttgactccccagctccaaaatcttcggtcccgttagctgttcctcctgtaagccaggctccgctagcaacactcgccactacaactgcagcagcaataatgcctagaggtacggtactgctgtgctggctctaaccttggctgcatcgtagttctcgttgctctcttcttccactgtattgaaattgtattgttcttgtccgtccgatgca

SEQ ID NO: 10311 - DNA, 547 bp, Zea mays
tgtccaattggtaggaagagtacttataatttttttgttcatttaattaactaaaaattatccatattaagttaacatatacaaattggaggcaaatttacaatccagattcagaaaattttatttagcatcatttaccctaataaggccctgttcagttacagggggattagaggggattgaggacttgttcggttgcgtctggatcgaaggggattggagtgattaaatccctccatagtaaaatacggggagaaaacaatgtgtttcctgcactcggtggaagtggattaaatccctccctaatcaaaattgaatagggagggatttagtcccctccaatccccctcaatccacccctaaccgaacaagcactaggctggaacagagcataagtacaggaagatctcaaactgatcaattaagaatttaaaggatcttattccctactgtattaaaaaaggagaaccagatgaatagtttttgaaacaccaaaaaccaaaattaggtaacacctggaatctgcaaaggaaaggaagaaactcca

SEQ ID NO: 10312 - DNA, 561 bp, Zea mays
tgcagaatcgatgtcatgatcagcaatgctccagtgcaagccttgtttgactcaaccttagatggctgcacttcttccagcctcagcacaagcttggccagggtacatgcaacaacagcagccagaaaaaaatcacctgatagaatgagtgatctgaggttcagggttgatgccaatgacccaggagcaactgatggagtcaaaatggtctcagtagcagcgctttgtgtggcataagtgccatctgcaagaacaacaggccgcctggaagatacagtgacagagttcaccactgcctgggctggcttagcagaatcagttgcctccccttcaacagatacagtgtagaatggtagatccccaagacattgtttaatggtagcaatggcactttcaacctctgatagagagagggagtactccccaagaatccagagagcacatgagcagacccgggatgctcgaatctggtagaatgtatcaattagcctctggatcatggaaacacgcagctttggattggtctcaatgatctcacgtacaaacagaacaacatcaaca

SEQ ID NO: 10313 - DNA, 472 bp, Zea mays
tgcaatcagcaggcatatcatcctcttccaaataccaaattgggatggattattcattcattcgattaaagcacataacatagtcagaaaagtaaatgaacacactgtaagatcatactgcaacaatccttatttcttaccaggataaatatcgatagtaacttcggtcaacctctacccctgagaaccaccatgtatgaggggaacaatctgaatccgagccccaacagagcaagaagcaactgtgatgtttctatggctgttgcttgggatcacggtacccagcatccaccaggaccttctccttcttggcgagctcaatgtcgtgatcgaccatcatctccacgagctcctggaacccaaccttgggcttccacttgagcaccttcctcgccttggtggcgtcccccttgaggctgtcgacttctgcaggccggaagtacttcttgtcaatgaccacgtgatccttcca

SEQ ID NO: 10314 - DNA, 496 bp, Zea mays
tgctttcacccgaaattaaacatgtaaataaagttatcatgagtcaattagtcaacaataccagaaaagattggatgaatagaaactcttgcacaagggtctgccacaaaaataaaaccatctgctaccattctccttggaaacagcttaacatgatacacaaacataataaggttttaaacatgattccacccgaaatagaaaataaatgacaaaactaccagaactactttgataaagtggagcatcaaaatatgaatttgatatttccaaagtcgctagttgatgcatgttgcaccgttgactaggatataatggtgcagaagtccaaagatcaacaacgagaagatcatatgaatgtaacatgcacttgcgattgataaaccttagttaatttcactggttgtagctaaactatatgcgcagttatcttcacaaatctcagtccaagttgcaaataaagggaacggtgtcacgatacagagaacaccgagca

SEQ ID NO: 10315 - DNA, 563 bp, Zea mays
tgtcagcatcacgcggacgaaaccccttaccaaacccggatcaccaccagagtctgaaccaaacaagcaaaagtaaataaaacccagatcggcgcatcgtgacctccgcccgcccatccagatccaattcccgaattcacaccccctgccgcgattagccggctcaccttgcgacggagaaggcccagggcatgatgggcagctcctcggtggcgctgtcctcgccgtagtggtcctcgacgacgacgccgtccgcggccgcggctacctccgcctcctcctgctccacctccgcggcggagcccattttgaccgcctccaccgccctcgacggcaaggcacgcaccttcgctgctgcggccctccgcaaagtgttcctgtaggtccgacatccgtcgcaactgccgccgccctcactttgtcctccccgcttccactgcggagaataaacaggcacacacacacacacaaagctcacatagtcaggtggcagcttcggctggatggaagaggagagcagccgcaattgcgatgcccggcgcgcggagcaccgggaatcgcta

SEQ ID NO: 10316 - DNA, 493 bp, Zea mays
tgtaaaatagcctgccgtaagttaaactggctcagaattttatataggcaattcaaatctatgaagatcttgggcggtttgcactttgatcctatatatgcatgttcgtgtgcctatataaacgctcgcgtcaacatacattactcatcgatcggctcttatatattagcaatggtgaggggtgagatgaagccgatcgagaacgaggagacacggcagatatgcttcaccaagcgtcggcagagcctgttcaacaaggccagcgagctctccatcctgtgcggagcgatggttggctccgtcgtcttctcgaccttcggcacgccgttttccttcgggcacccatccatcgacgacgtcgcaaaccggttcctcagccctcctcctcctcctccgtctgatgctcccgctgcttcgtcgggtggtgctggtgctggtgctggtgcaagtggaagcagcagcaacgacgacggcaggggtaccgagctcgaat

SEQ ID NO: 10317 - DNA, 450 bp, Zea mays
tgcaatagtatgattggattgttgccaagttagtaactattgaccattgaaaagatttacactgttcatttggcaaaaaaaactagtttaaactgcttatgacattataaatggaaatttattctgttttctgtagatgttgtctcactgaaaaatgaaatgttttttatgtgctgtgtaaactttgttgtgcattttctcatgtgctgcagtccaacaaattttttttcaatgtaggggcaatattccattttccttgcaaatgtatcctacttactggtattatatactaacagtggcttctttcatttttgttctttctctcagggatcagatctcacagataaagcgagccagaacggggaattaacatcagcaccatcaacgcagatgattagatcccatagtgcaactggcagcctgcatgtaccccagcttaacccaatagca

SEQ ID NO: 10318 - DNA, 566 bp, Zea mays
tgttttgtacaagtataatcgaggatctcgctgtaagattgctttgcgtgtcttgacaaaaagatttctcggccgggagatccagaacacaggatcggggcatgacagtgtggaagatgctagagctgctctagaacttgctatattgaaaataagacatggtaaggactaagaaggcatttttgctatcacttttgtttggctaacatccatttctgtaaatagctaatgtggatagggagacaacatggcataagcatatcattttgttggtactttctactaacttgttaaccaggtcctgattttggttcccaaccatcgttgtcaaggcggaaattgacatctatactgcatgagagtgggaaaaaatgctcccttattgatgacatgtctattctagagcgatattcagatacttcttgcaattcaattgctgtcttttctgatgatgatgccctctccagatcaatgaaggaggttggtgcaatgcatttgtaggtgtatgcattcttcccaaagtgttataagatgttttcataaccataggttgaaatcctactgca

SEQ ID NO: 10319 - DNA, 552 bp, Zea mays
tgctttttctgaaagccgtggtttgcatgttgcacggcagtactgaatgtacctatacataaaaaggttatgcattagaagacacgaatacaaggtcaaatttacagcagaaacacaagatgcgggacataccttttaagccaattctctccttcacttccctctgtgtttgcggatgacgctgctgcaccactggcatgcaccttgataatgtggcttgctattcgctgtattttgatgttgcaattagtctccgaggcagctaggatagaaaatctgtagaaatattttttgcttcataccttatcttggtcatacattctgatatctttgacaataaagattagatcaaatctagaaagaatggtggtctgtagatcaatattatcttgtgcagtctgttggaacagcaaaagaaaatttgtcaaattaattgtcttgcatgtatggctagaacagtttatatactttatatagtggatatatgttgagtcaataaaaacatgtttaccaaccttaagatcgtcatagcgccctgcaattggattggca

SEQ ID NO: 10320 - DNA, 582 bp, Zea mays
tgctttttctgaaagccgtggtttgcatgtggcgcggcagtactcaatgtacctatacataaaaaggttatgtgtgagaagacaagaaatatacataaaaaggttgtgtgtgagaagacaagaaaataaagtcagatttacaacagaaacaatgcgcggataacaccttttcagccaattctctccttcactcccctctgtgtttgtggatgaagctgcagcaccactggcatgcaccttgataatgtggcttgctattctctgtattttgaagttggacttagtctctaagttgctagaagagaaaacctgtagaaagagttttgcttcataccttatcttgatcatacattctgatatccttgacgataaagattagatcaaatctagaaagaatggtcgtctgcagatcaatattatcttgtgcggtctgatgaacagcaaaagaaaatttgtcaaattaattgtcttgcatgtatggctagaacagtttacactttacaaaaatggatattattgaggcaatgagtaacatgtttaccaaccttaagatcatcatagcgtcctgcaattggattggca

SEQ ID NO: 10321 - DNA, 493 bp, Zea mays
tgcaggcaggctgttagctgctctagtcaagatatgtgccggacatggacagcttcttcttggcaggggcgtttggaaggtgtgttctttcttcgttgtgctgtgtgtgccagtcctctcgtccgcgggcacatgccaagctgtgagcacgacctttttcagatgagaggtttctgtcggttcgtaggggatgccatgtgtgtggagccggccggcgcgcgacctaacgcgaaaaaagaacggagaaaagtggggagctaccatctggtggcgcggtctccatgattatgtcgacagttcaaccgcatgaactgcttagaaacaaagaaatgtaaacgtcatcatgtgctttgctaattcagccagtcctttttttgttttcgtttattttattttaaaacagtccttttttttgttttcgtttattttcgtgttaggacctgcacgttttcacctatatctttttttttctctctctctttgtatccctgca

SEQ ID NO: 10322 - DNA, 590 bp, Zea mays
tgtaaccaggggagagaaaaaaaaatctcagagccagccaagaacttcaggccaaataaacataaattctcaattcatacatgcatgcatgagtacttaattcaacgcagacagcacaaaaaataaggcagaacaaaaaggattgcacacatataacttcaaataagattcaatttcgtgttcactgtatcagggaaaagtagcataacaacaaagaggtgaaaggaagaaagggccttctgtttattgcacgagtacaagtcaaatgatcgtaataatggacttatagaataaaacaaaccatgcttttctgaagccttcaaccctttgagtaactataagagctaacagattagtacaaaaggaataactggacccaatctctgatcctttgcatgtatatgtattctcagcaagagtacaaagttattaatagaacccgaagcaggaaacaaaaaaataaactccccatctgcccgcaaagttattttctttatatttttttatgttattctgtttatgagcacctgttatgttcagaaggcaaaaaaaaacgacagtgtatccatgcatctgacaggggtgccgag

SEQ ID NO: 10323 - DNA, 549 bp, Zea mays
tgcttccaccccgaggaccagccgccgcccccgggaggctcatccttccctcccgagggcggccacaccccagcagccaacccttggccgccgagcctcccctctcccagcccactgcgccccgagcctcccctcgccggtcatggaggccgtcgccggccgcccctgcagctcgcctccaacaccgtcgcggccctgcacgccgacacggggagcacgcgttcgcgggccatcaacgccgcgagcaggcgggcgcgggccggcggcggtgcccctaccctcgacggctgccttagtccctggcgggcacggccccggccacccccgctcccagcgcgggcgcggtcgtccgcactgcccccaacctcctccgccggccgcgcacggcggttcccctggcgcaggcctccctcctcccagcctcctctctctcctctcctagctcggcgcaggcccaggctcttgaaatatcaaaatgcttattggaaacaaagatacacggaaagatgggttaagctaggggattaatgcactaagttcttccacgca

SEQ ID NO: 10324 - DNA, 544 bp, Zea mays
tgctgatgcaaaagaacatgagcctcccaacagtcatgtctataatgcagttaaacagtacaaccttgcagattttggtgagaccaattcagatgccacactttttattattaaatcatatactgaggatgatgttcacaagagcattaagtacaatgtgtgggtaagcacccctagcagaaattttaaaaaaaaaaacaactagacgctgtcaatttcctccgttgcctagagacttaagttagttccagttcttcgccgttcctttatcaatttcctccatatatagcccccgatcgatctgttgttgatagatctgaagaataaagaatgatacagttccataatgaagatttgttagtgctgaagaccaccggtgtctgatccttgatcgctactatggccaagcaataccatgcatgggtgaccatcatggaccgtgcaagaaatacttcaaagtgatgcaggcagcactggtaacgattcattgtttggcagttctggcgcgttcatcttagcgaaccacgggtgcctgagcgctgca

SEQ ID NO: 10325 - DNA, 499 bp, Zea mays
tgagggagagcttcatctccagcgagagtcgcaaaccctccatgagttccccattccccaaccttctgattttgacgccgggtcgtgggcaaatcaggtagagcggctgcggattttggcgcccggcctcgggagtttgggagcttagcgactccacagtggaagactggtggacggcctttgcccgcgctgcgtcttcccctgcttcgcgatgggaggctcccctgtatgggacgggactctgtctccggacagcttcaacacctccgcggcggcgcttgttaagaggtggaaggagatcgaggtcgacgattcccttcctgaatggacgtggaagccgtgcagcaaattgggggtgccgtcggaggtttgtctctctctcttttttttacgtattgttttccagtctccctttccctgattcaccttgttattttctgaatatgcttgtttgtcttgcaggtagaagggtatctagccctggaaagagtgtaccgca

SEQ ID NO: 10326 - DNA, 537 bp, Zea mays
tgccgagggccgagtggcctactgcccttccccgcatacaggtgcgcagtaacattgcacccctgttgttgatttttgtcttattaattattgttacatacatcgagagcgatattttcttcgaagtgaacgaagaagatataattgaaacttttatcgagagaaacattagatagaattctatatgaaaattttgttgtggcacaccctatgtaaaaattctggatccgccactggccagagtggacaccgacgggatcgtgatctcctgcgccagcgccgagttgatgatgctccccaggtcgacgcccttgagccgcgcctccgcgtcgccgtcggtggacgatgacgccatcagcttggtcaccagcggcgccaccgcggccagcagcggcaccttgcgcgtgatcttccccgggaggctcgacgccacgcgcatcggccgggagatgaggttcttcttgatgaaccggacgggcgccacgtcgaggccggacacctgcatgcacgcctgcttcaccttgtcgtagtcgggca

SEQ ID NO: 10327 - DNA, 561 bp, Zea mays
tggtcggcggtgacgtggaagccggcggcgagcggcaccaggctgttgtcccagtccaccacctccaggttccggaagtaggaggcccggccgaagccttccccggcgaagtggccgctgcccatctgcgtggccgtgtgcgaccccgacgcgcgcgtgttcaccacctcgccgccgaactgcaccatgctcgcgtgcgacgccaggtggctgaacagcagcgacggccagtaccccaccagctcgccggagccgaactccagccaccagttgccgtggttcgggtcctggattggatagatgaaaccagattatctttcaacgtactcatacggagttaatacggacggactagctcatttgtaaaaacaacaacaacaacaacaacaacaacttgatgtatgtgaaaagccgtgcatttgaaaagccgaaaggagcaagcaaagtaaagcagactgtggggagtgcaatgcaatgcaatgatgtgcggcgtgggctgctgctgtgagctgtctgcctgcaccccggccccgcgcagggagggagagggaccggagctca

SEQ ID NO: 10328 - DNA, 570 bp, Zea mays
tgcaaatcatgggatgcaaattagtaacagataatttattgactgctctatcaaagagctgcctgcaattggtagaacttggagctgcgggatgtaacagcataacagatgctggtatatctgctctggctgatggctgtcatcacataaaatcactagacataagcaaatgcaacaaagttagtgatcctggagtctgtaagatcgctgaggtttcttcatcatgcttggtgtcaataaagctattggactgcagcaaggtgggagataaatccatctattcgttagctaagttttgcagtaacctagagactcttgtcattggtggatgtcggaacattagcgatggctccatacaagcacttgctcttgcctgctccagtagcttaaggagcctgagaatggactggtgcttgaaaataacagacacatcactgcaaagcctgctgtctaactgtaaacttcttgtagccattgatgtcggatgttgtgaccagataaccgacaatgcattcatggacggggaaggatacgggtttcagtctgaactgagagttttgaagatcagca

SEQ ID NO: 10329 - DNA, 533 bp, Zea mays
tgcggctgtcggcggtagcggcaaatctacgggcaagcgaattgagatttgatagataagtagcaaccactgcctacctgtaacaaattttccagttcattctgtacttgacaacttggcgtcacattcagagctgcacgctcgcactcaacagtgcaaaagttacaacacaaaaccaaatgtttcagtttcagtaaccgtaactgcctccgacaagtgcgagacaatttccccaaaacgctttcactcgtatttatagatacaatccagacaaaagatctgttgtgtagttccaattctttgcagacatactgtaaggtttgctgtgctcagatctgctcgtggcaaacgcagtttagttacaatgtgctggcgacgcccaactcgagctcattcagcagagccacggctcccggagacgtcgcactcgtcaagcagcgctaggatgttgtgctcgggcgcgcttacggagggcagtatggcgcgccttggaactgcagatcgtgacctagcgctgctaccgtcaggctcca

SEQ ID NO: 10330 - DNA, 431 bp, Zea mays
tgcatgtgcatcacaagttgatgcgaagaacagtattaaatgggcaatccaccgcatgattggttggcaagttgtcattgggtaacacaaaatgaactttggcgacctgtcgtcgtcttttgccccgagagattgtgacacgaaaaatcaagttgcgggtaccaaagtttatttgtggttctctggagctgcttctctcttcaaaaggactagtagataataagtctgtggctgtgcctttgttgtggtcgtggccagtaatggtctctgagtgctctattgctagagacatatacggtgctttaggttcttcgcacgtggagtagcgtgcacagattagatcatctcaagatggattgtactcgtgttgtcgtgggattatttgtagcttatgttgctttgtcccatgtaaagcggtactgagttttaca

SEQ ID NO: 10331 - DNA, 509 bp, Zea mays
tgagacacaattcacaacatgtaaattgcaataagtctgacaaaaggagaacatacaatgctgtgatgctgtaatttgatgtcgaaggaatgggggatgttggccctggcaagtttcttatcacgatatcaggatctcttaaaggagatacacttttgtatgatgaagttgcaatcttcatgtcgagaaaaatttaccgttaagaaatcatgaaggataccttgaaatatgatcacatgtcatattataataaactgtgctcatgttcgtagcttacatatacttaaatatatacatgcatatcttacatcattgtctaatacagaacacatgcagatttcataatggagcaactatttgacagtgttagtgccaaaaatcatatgcaggatgtggaagtcgtaccatgctatttttcccaccagttgaagtaggaaacatatcccttgtgatgccagacctagaactcctgattgtagcatggtcttttacaaaagggcgatccatca

SEQ ID NO: 10332 - DNA, 544 bp, Zea mays
tgcacctccacctccggcgccggggccgccgccgcccctgatccgggctttccgtctgaggaaggggccgtggctggagactcctcctggatggcgtcgtcgctggtctccgcggcaactgccggcgccggcgccggtgccgcggctctgtcagcttccgactccatctcgatcgggttcaggggaacggaatctggttctctggccgtctcgtgcttgagacttgagagaactaggtgctaagtgcctaagtgaagttcttagtgggctgggctaaacctggcaaaggcccaataatcgaatcgtttgatatattcctcgagttttgttgaaaaaaaaaatacacgagacataaaaccaccaggaaagagaacaaaaagaaaaccatgaatatctgatgcatttcaccttttacgctcctacagagcacaaatttagcggatcacaaatatttaagaacagagatagtaactaatatgatagtaatttgatcagcaaacctctgaaattaattcatgatctggactagtcctctacagctaca

SEQ ID NO: 10333 - DNA, 479 bp, Zea mays
tggcaccactgatcgaagcacaaaatcgcagccttcagcgactggggaggaagatgcagattatactgccactccttcaacaagaacgagaatgagacgacggcggacgccaggaacgatggggttgggcagtaccatgtacaagcaggcaccactcgtgatgcgcttgttggtggcagtcttcccgttcctgggatcatggttcaggctgctctgaattgattgttatatattcgtccacggtggttcgtttatgatttcagaaaaaaaaagatatatatatataagtggccagtggcattaaacaaaggattatgattgtgaaaaatatataagcgtagtgaagaagatcgattggttcaggcagtgtgcctgcagcatcagctctgtactgctgcatccgccattgcgaagggaaagaatcacagcatctgacttgctggtgcatgtgtgaacctttgcttcctcgcgcttgtgca

SEQ ID NO: 10334 - DNA, 442 bp, Zea mays
tgcccatctaatatacatttactgcctggatgaatgaaagttcttcactacggtaactgattttttggtggcttggtgcagccatatgatttcctctcgctggtacctgtcattgaaggagctggagggtcaataactgattggagaggggacaagctccattggcctgttactgcagaatcacggcccacaagtataatcttcattcctctttaaaattaatgaagccctttttgctgtctttaagtcctttctatgtttccttagctccagagtcgccctctggtttcagtaatttcataggttaattgcgccaaactgcattatggcaaaaacttgccctatgtcacttcaatcatgcactccttgattttgatcagcaaagttttagttcatctcattctgcactattgatttatttgtaggttttaacgtggtagca

SEQ ID NO: 10335 - DNA, 510 bp, Zea mays
taattcgagctcggtacccctggtcgatgatacaattgcaaatcgcaacatcaggattgatccctttctcccacatctgtttgaacagcttcaccgcggcactaattctgccatttttggccaatgcgtttatgaacgtaccaaaggtgaataggtctcgttcaaccttagatgcaatgatatcattccaaatcctttgagcgtctctcaggcttcccttgacacaccaaccatttagtataatgttccagctctttgtgacatgcgggaactcatctttcttctcacggaacagcgcctccgcctcctcaacatgcttataccggcacagcgacatcattagtatctggaacccgaccaagtcaagctcaaacccgtaatccttcctcaagtagaacacctctatcgcctcctgcaccttgtgcgcaccagcgtaccggttcaacagcacggcaaacatcttattcgtcacgaccacctgacgtcgctcctcaggaatctcgtcaaaca

SEQ ID NO: 10336 - DNA, 484 bp, Zea mays
tagtacgagcccggtacccctgaacattaaaactaaaacatccttttagtcttgtgtccaccgaaatcaattgagggtttgaggtaatgcatcagtcattgtctattgatcagcacaaaaagtaaggatgagctattatacccagaaaccttcaaattaagataaattgatattcccatagtaagcagttaagcgcaccctttgaccagtagttaaacaccagccactgacacaaagccagcaaaggagcacaaaataaccatacacgtgttgtaatactgatttaggtctcttttggttgagcttttttaacctgctttggtttttataaaagccaaatgttaatcaaaggtaggcttccacaggggcggaccactggtgtaagtactaacttttgaacttggcagttaaggatcgagtcttgatgatctttgttttttgtttctttttttgatatttttcctggcacactctaagtgtagca

SEQ ID NO: 10337 - DNA, 480 bp, Zea mays
tgctcacctcacggatgacggatgagacccacgtgccagggatgagggcagaaacaggtatggacttgggccgtgtactggtggcctctatgtgtaaattggtctggctatggcccacggacatccatagtcatctgcgtcgagtctattttttagcgtgctaaaccatgtatccatggccatgcatgtgtttttgagttgtttggtgcaatatgttacggatattgtatgtttgattttaatttcttcgttcacaatcactatcactacacctttaaagcgtgacaaaaaaatgggacatgcaagattcgactccaggccacttcattgataatgtttcgcttttatcactatatatagctcacgtctatttgtattatattaaggtagagactagcataatgtttatgcattgcggcgtgacacaatcattttaacggtaagatgaggctaagaactggagctcaattaatgcttgca

SEQ ID NO: 10338 - DNA, 470 bp, Zea mays
tgcaaaattgacgggccgaaaaacaggtgggctcgtgccgcagattcccggcactaagattgtagaagcccatgtaaatcggcccaataacttaatgtttgtttggtagaactagtaatgtagcagtagtagtaactcggacgccaagctttgcacaacaattccttccagtttgtgcaaggaccgattttcacggtctcgacaaacgtgtccccacagaacaaacaatcaaacattcattccctcacgagaaaaacggagagatctcatctccaatcatagcaacccgcttccatgaaatcattacgtgccaatgaaagtttttgaatataagtataggaggtgtggaccagtaagtactgttttttttttctcgcattctcgtcctcattcataataataaagttggaaacctgcatcgtcgtcgtccccaccagagctgagcccgacaagagcaacacgcccattca

SEQ ID NO: 10339 - DNA, 549 bp, Zea mays
ctgcgtcgccaggcgagcgcagttcaggctcggccgccgccctgcccgctttgatgttttcagccaatgccgcgccgtcgacgcctccatggcctgcagccgatgacaacgccaagtcagacaagatatatagtagtagactagtagtaatagaacgcgctttgtatattttatatacgcagaccctgaccatgacgtcgatgccagaggcctccaacgcgagggagacgccgtcgtcgtagttgggcgtcgccggcatgtcgtcgtccacacgcagccatctcttgagaagcaagtggtgcggcattttcagcacgagctcgccgtagcaggagtgcgcggcctccggggactctgcaccggctgagctctgagaggcgaaggtggcgtacagcatctgtaccgcggcggtcgggttgtccacgcacgccgcgccttctggggagcacagcacgtacgtcccaaacggccggtacgggctcccacctgtcgtctcagaagcggcaagcttctgttccacggccacagcgccaacgtgcgtctgtatca

SEQ ID NO: 10340 - DNA, 476 bp, Zea mays
tggagtcctgccccgtggactgcatccactgggtcgagagccacgacctgcccgtgctggagttcctgtcccggccgcagccgaaggaaggccacggcgtattcggcggcgggtgggagcggcccgggaacgtgtttgcggcggcgaagaacttcgccaggagactggagagggagaagaagcgggaggagctggaacgggatcagccctccgggggcctcgacggtaaagtgaaccagaatatctgtccttagctttccttggttcgcgcgaacgagcttcagaaacttggttgcaggggatgcggaccgcgaggcggagacggaggcgcaggccgaggcgaggcgcagcgcgtgggaggagctcaggtggaagcccctgcttgatgcttggaatgggctgataggtggtcgttgacgctgtgcaggaggttgaagagaagctcagcgctggaagctgaacccgtaacatctgca

SEQ ID NO: 10341 - DNA, 630 bp, Zea mays
tcgaatagatcttctattctaggcaaggggtacttgttcttgattgtgacctcattcagagctctataatcgatacacatccttctggtgccatctttcttctccacaaatagtacaggggcggcccaaggcgaggtgcttggccgaatgtatcctttctctgacagctcatcaatttgcttcttaagctcaaccaactctggtccagatattctgtaagctctcttaaagatgggggcggttccaggaagaagctctatggcaaactcaactttccgctctggtggcatacccggtaagtcctttggaaacacatctgggaattcagacacaaccttgatactctcaattggatccgcttcactgctatcgacagccatctgataacaacttcctttctttggctcaggcgggactaactcggtcaccacttcctctcctagtggggacaccaacttgattgtccttttatcacaactgataactgcctgatacttatctaaccaattcatccctaggatgacatctattccctgagtacccattactataaggttggcgggaaacgctatcccccttatttccacacttatatttaaacaaatgctattagctcgaattctaccacca

SEQ ID NO: 10342 - DNA, 616 bp, Zea mays
tacgaattcgatctcggtacccctgtggtatccccaatttgttgattattttcagaaaggcctcaggtacaaaaccatgtggcactgtaactgcacaagaaggatcaatgcttatacctggcaaaggagagtgggtggaagagtacaggccaacatgcctctgatgaacatctgctcctccgtaagtgcccgcactggtgtgcctgaagggttccccatcctcaacaccattggggggtaccccttgttcttgtactgacatacttttactaccacggaccctcctctgctgaagtattcgtctctgccttctgctcaacggtgcttcatcatactggctctgtgattcttcatctgaacgtgtatggaggtaagcaacaagtccaggaggaagtattcttgatagcaaatcaagtgcaggttgataggaatcagcccaaagagcaacaagttgccgactaacatcacgctgttctccagcaggcaagaagaaagcatttagtaaatgcctcagaagagcaccatccttcaaggcagcatcacgcatgaagtctgctgctattgcatcttcctcagcaattgtacgcattataacagaaatagtctctcgcacact

SEQ ID NO: 10343 - DNA, 492 bp, Zea mays
tgtcgttgaatcttgtacagaatctacagatgaggtaaagtacaattacaagcgagtacagtgtgattgtctcgttagtcagcatcatcgacaccaaaatctggttctgggggtttcggtagcctgacaatggtaggaacagccttgcttcttagcctgtgaacccctcgcatggcgttggcagcgaaacgagatgcatagatagtcgccccaaggctagggtggctactacttggccggcttgccgcctcttcttctttgcgccgctgctctgccatcttcctcttgtagtagcggcgccatgctgcttggatgaagcaggctgcccaggtcctccactgctgggaatagaatcggaaagtatgctgcacttgcctgctgtgcagcctcctaaactgactggccacgaatttcagctcttctgcacatagggcaaacgcctcaacctcggtgagtgcctggacagtcctgctcgaaactggaaaattagca

SEQ ID NO: 10344 - DNA, 533 bp, Zea mays
tgcagaagctcgtggtaaactactgcgactggggagggagcagcaggggcatcaggtatgatgatatagtttggttcctctcttcggtagtggtaccattagaccattgtttttcggtatgatttccttggttctgttgcgaaaagccgaaaattagttgagatcctgctggtacatgttcttcaatagtcggatggttggtcgactcttcccagccatggatttgtcgttgcagatgagtgcggtgtatgtcgttacaatttggaagttggaactgaagacaactatcctattgcctctagcttctctagggcattcctgcatggaaatttcatttctactagacagaaatgtgttatgggactagcgggtactgatgtctgggaagcccatttagtcgttagttcaattacatgctatttattgcaacaatagaatcaggcactttatgcctatgcttgtattcctttatcagattttagctcgagctatggcgctttccttgtacagcagtacactatagtttagtggca

SEQ ID NO: 10345 - DNA, 436 bp, Zea mays
tgccaagataactgaagattctacatttgataatgatgtgttttctttccaaccccacttaggttctgaacaaacagggttctctactgcagaaaaggtgatttccttgattgttagtatctacctgtattttccctcctttttgcagtgcagtgttataatactatttggcttccctctattgccaacctcactacaaaatttcctctttttgtttttttggtacaaagcactttttaattgattcatgtgccagaaaaatgttttttatctacaggactatggtgcctatgagaaaaagcagtccttgtcgaatattcatcagcaggaatccagtcttcagtcaagctttaccgcagtcaaggataacactagtgcaacaattgttaaagcgaagccatcttctagttccatgttcagtgatagtcactattca

SEQ ID NO: 10346 - DNA, 577 bp, Zea mays
tgagcctcaatgtgccccaccttcttgctgctccaaccttgaagggccctagctgtccccttgaattttaaatcaagagtggagtatggacattggccaacagggacaggattccaagcattgtgcaccacctcattccaaaaagattcaaaatgaaaacgccttttaacaactttgttatctctgatacccactagtgctgaaattatgactctgatggctattgtgacactcttacacctcttctatgtgataacatgggtgttatacaagtttctcatgatcttattaaacatattggtgtttatgcatcgttcactcggtcttcaatatgtgccttcagaatcccaattggccgatttcttcaccaaagcgcaaaccagagcacatcactttcacttgatcacaacatcgcttcagatcctagccttccaccttgagtttcatgggggtgttaaggcccattctattgctaaggcctgctggcctctatatgtactacagtccctattgacagattatcatctgtcaatcctaaggttagtaacaagggcaggggtaccgagctaggattagg

SEQ ID NO: 10347 - DNA, 531 bp, Zea mays
tgatgctgctactgtgacatacagcaacttaacgagggttcttgagagcattttatgtctattgtttaaattcaaaacagcatcaattagcatgactctcatatataagaattatttgagaacatcacaccttatatatgggacaacacacgagcgaggtctggaaggaaggaatactgactgcacctagctagatcaggccaaaagatgctacacaagtacacataatttatacaccgacaattagaagtaagtaagtaataatataacctgaaactagaaattgtaatgataattaataaaaaaaccattttattttaaacagttttatttattgataaactgcataatgaatatcacgaaaggtatacttatgaaataagtatatataaacacatatgataccagcaatagtacaagtagaacccctctatgactagacattatatcaagtttattgttctgaaacaattagctacgccgtcaatcactagcagttaaacacttacggacagaatactcagaccggca

SEQ ID NO: 10348 - DNA, 563 bp, Zea mays
tgtgggtaaggataaccctcctgatctagcacatttggttccaactggcgtgccaaattcttcagaacaaccagttgagaacacggcacctactaatgttcttaaagagacaggtcagcttttcatgcatgcaatactttaagatttcatccccttgcagttatttgctttatcatctatcgataggccatgctggcatttttttgcatcaacaaaattcacgtgattcgatgacccttctgtgcatgccccacatttgtttggatgactgtctagccgagaaaagtttttcttcagtatgtacttattatatcatatataacagggtaaaataagtgtttggtagcattagcatgcccttctttttgaatctgaattatgctctcatggtcatggctggcaagagctctgtattttaatatggttcgaaagtaggtaggaatttcttatgggtaacgtaaatgtttaccattgccattagagcaaactaacacttagcttgtgacctttcagtccacaatgcacataatgttgtccaacacaaacatagcgatcatgtagca

SEQ ID NO: 10349 - DNA, 466 bp, Zea mays
tggacctgacccaactctgccagcaagaagacagccaagaacaagaggcacaatctgcgcgacgccatggccaagtcgaagccgaagccaaagccaggacctgcagcctggagcccagcctgccatctacagagacctgcagcacgccggcgacgatcaggaagagctcctcagacaaccggctgcaagggaagcggccgcccaggctgctgatcagctcaaacaacatagcgccgctgccgcccaccacgcacagcaacgccgggccatcgcccggcgggaaggacgacgtggacccggactcggccatgatgggcgagtgcctcgacttctgcaagcgaaacctgttcgcggaggacgggtacgaggaccgctacctggatgacctcgcggagctgccggaggcgctgatcctgaaccgcatcaactccaagcgggccatgcactcgtaccagctcgggaagca

SEQ ID NO: 10350 - DNA, 528 bp, Zea mays
tgctatcggagcaaataccaccacagagaaagcaataaatcgtgaataccaacttttcaaaaaaaaataaaacttgcttagaaaccagtattggaatcgtcaggactagaatgctagacctaggacgaaaggccttaggaatagtggggaaaataggtggctaaataagtaggccctatgggccagtcttaggatttcaaggatgccctaaaaaggcaccattctgattcggcgaggcgacgctcctttcagcatgcatgcattttaaaacacgaaaggattagaaattaaaggagtaaaaatttgatctaacccacttccttttaacaacccgggctcacatatttttctttcttataccataacctttacgtctgatcctcttccacagatgacttcacccacccccgccaatggaggagacactcgtttcagttctgatttccttttccacgagggtttctcttccatcttgtgggagctgctcaactctgccggttaccctacgccccctttgtacacggtgca

SEQ ID NO: 10351 - DNA, 553 bp, Zea mays
ctggcgtcatgtctcccgtgcgcacacgctgacatttcctgcatgggcacccgaggccgagtggcgagtgtactcgaaccatgtgttgtgtcgaagtcgaaccaaatgcaagccgtggtgtacataacatgcttcaccgtgaacagatcgctcaagcaaaactgaggaatctcaggcccaacaaaagatgggagagactcggtctttaactctgtagggtatggtcaaattgctcctttcgtaaaccaaccacagcagtagacaggcttcggtatcaggagtcccagagtgagggtgcagtaggcttttcatacagatcagaggagtcgagagtgagggcctggtggaagccacctggcccacatgacatcatcaggtcatcacaagaaaagtccttcgcgttttttttttcctttcagctacatatatatgattaaacctgaccacaggaaatgtgccggttcaggtcaggcaccttatcgtgtcgtctttagtttcagttgttgggcatggagggttcatttcacctcagaaacaaatgcctcaaacacca

SEQ ID NO: 10352 - DNA, 743 bp, Zea mays
tgatgagcaaactaataacagtaaggagacagacagacacacacgcatggtggcgcaaatgcaaccggccggccggcgggcaagcagccaatcactctcccaggtgccgaccgcggatttgtttggtcccgcaggtgtcacccagcacaagaacaaccctaccacctgagacctgacctgaccttcgatcgggagagagcccgcccgcggccccgctacggtggctctcccggccggcacggggaggggagcaggcgcggcatcggatctgccaactcgggtctcggcaagcgcatgcaggcagcaagtgtttctgtgccagcagccagcagcacgcactcgcaagcctcgtccgtcccagacagtgcgcgggtgcatgcatgcgcggctaaagctagtagtagtaggtccgcgtgcatgcagcgatcaatggagccatcgagcttttctggctcgatttgatcggggaaaagagaggcaaagcaaaagccagagctagctagctagctagagtaagcgtggaggcaggcgtcgtatactcgtactgctagctccacacactcacacaccactggtacgagctctctcggagctggcgctggtggcggtagtgtccgccttttggaaccgacgcatccgatgtcggattggattagactggacgacggagagcgccactgccctgccctcgcacggcttgggcccccccgccgtgttgtcttgtctccatcaaggcatgcagg

SEQ ID NO: 10353 - DNA, 549 bp, Zea mays
tgtcttggaactctgcgtgcctcgttgcggcagcagtagtagatagatgcttacgccggcacagcagagagcggaattgaagcagcaacgagaacgagatgccaatatgccattgccatttctgtggtgcgcatgcatgcaggtcgggagcctgagcgccgagtggctggccgaggagaggacccaggtcgtcggcactttccctcccaagaagaaagggtggaccggcttagtggagaaggacaccgccggccagaccaacatctactccgtcgaggtaacccttcgatacaaatctaattctgcggccacttcactcactgtggtgtaacctcaatctttctgttcctggatacaagatagctttattatacgatacatcacctcctgccatgccaactgatttgcacagccgatggtgtacgtggccgagagtgccatcagctccggcacggcgggtacgtcggcggagggcgccgagaacacggccgccatcgccgcggggctcgtcctcatcaccgtagccgcggcctcgtccatcctcatcca

SEQ ID NO: 10354 - DNA, 498 bp, Zea mays
tgttgctcctacagataatactactacatctcatcaaaaagcagccaatctgccacgttttgaaaaagggcttatacatacacaagcgggcgtatagatatgagccgtcgaggcagaccggcgcaggaataaatttatcaaacaatccatctcctatcctgtctgtgtttttgtatcgctgacatgcaattcaccaattccagaccaccaccaccacattgcaacaccaagcaagcaacagtggcgtcagccaacctgcgaattagaaacacgttagctcatgaggagccctggatcgtgttgccacaatccaactgtgaaaaaaacaagataatggcgtacaggaacaagataaagacgcaacacagcagtttgcttcgaataaaacaggcacaaacaaaatcttgcgtctaacagaaatatcgctagtttcaggaaaatcagcatcaatccagccaaataattgataacccaacgccaggaaattctgaacttcca

SEQ ID NO: 10355 - DNA, 574 bp, Zea mays
tgctggcctgctgcggcacgcagatgcagatgcagatgcaggcagcagcacagctcagcccgctgccgcacaggaactaatggccatctggctctctctctcccacctttcacctattcaatgtccctgttcgtctgcttgcttgctagacgctagtagctagtggccagtgtctgttctgtccccagccagagctaccaattaagtttgcctcgccttcgcctcctccatccacgatccatccatcctccctcctccctctaaataaacaccggaccaccaccagccttctctcctttttcccagctcgcagacttgcagtgctgtggtgaccatgcatgcatacggcattatattgcagggcgcggtcaaggcgtgaagcacgcacgcagacgcagcctcatatatcagcctcaaaaggaaagggccgtccggccgggccgggccagcgtgaaatcatgaaactgcatgcgagcggggactaccatgcactaccggctggatctgactgactgcagcgcgtttgcatgcaagtccacatgcaagcgcgcgcgcggccggcggcggcagggca

SEQ ID NO: 10356 - DNA, 509 bp, Zea mays
tgcgaagctgcagttgcagccatggttattaaggtggtaaggcgatataaggcgttaggaccaccgtatggacgtctaagacgagcaagacgacaccttatcagtctcaaaaccagcaatatggaggaagaaaaagaaaaaaaagaagggaaaaggggaagggttaggaggcccagcccactagctagcccatataatcattaccctggttgcctaggttgactctctactccacagttcagccgccggttgccttctcctccatggtttagccgctaccgccccgattgagccgtcgttgcccctagttcgccaccgcctccgtcgattcgaccgctgccgccctgatttgacaccgccccttctctttcccctctgctctcttgctgattcttacctagacggtgggagtgccttggaccttttgggcgcctggatgattcttacctaaacggtggaccttttgggcgcctggatgcctaggcgacgcctttgaaacagtgattgca

SEQ ID NO: 10357 - DNA, 522 bp, Zea mays
tgctgaagaatacccatttcaaaagccaaatgttagactaaccccacctccaatgctacatattacagaataaccttaagcttttgtaggaaaaacttggcaaggtacagttttcacctgctgctccatcttgagatggaccatcagcttgtgcttcatcatcatcgtcgtcctctggtggcaaggactgagctgcaacaacagaatgattgctgtttgcagctttgtcttctttaatcagagtctcctgcaaacgaaaaatggatgtcaattagtatgaaataaaaaatacagcaaaccaaggatcaagcatgagaaatgtgccatataagaatccacgatttatacaataacagttgctatcacttgttcaagtcttctaatcatttcactttcaaaccgaattctgaaaaaaaaagtacccacttcatctagtcaaaagcgtttagtgacaattattaggacaattttcgccattacttagaagtgacttcagataaagcacaaatgaaacatggaaca

SEQ ID NO: 10358 - DNA, 566 bp, Zea mays
tgccgcacacagcacctcgccgtcgcgtacgcccacattcgagcccatgccgctgtcgtctcggcgacatggaatactgtgtccgtccgtttccttttccccaccgctataactgttggcattttctcctccattaatggcggccgtttatcagcttcaatggccattgaacatgccagcaattccctctcctcgcctataaaaacacctgcgcgctgcatcgaagccatcccggcctttccttcctctcctccgcacactactctctcttcctcttttacatactcctctgctgcttctcgctctactcctacgcaacgcctcgcaccgcgcctgttcatcgcagcatccgcgcccagacaccgtcatgacaccgctggagtctagtcgactctccttgtttgagtcattcctctgcatcttgcaccgctcgccggagttcgtcgccataatgtcgcgggagctctgcgtcctgcttactgctccagcatccttcctcccgcgatgccgtgattccggcaccgttgctgccttcccgcacatcagcaccacgacttcatcgtgca

SEQ ID NO: 10359 - DNA, 451 bp, Zea mays
tgatcgagcaagcatgagctggcgaggccggtgactacacatcagcacagcacagtcacagtatcgacctgctaataacgtacgtaccttgccttgcaggtcccgttctacgtgcacacgcgcatgctgtcgagcgccgtgaaggccaagctccggccgtggttcgtggcgacggcggaggagtacaccagcacggcggcgcggtggatcgggaacggcccggtgtgtgttcccggagccgcccagaagctccagtggtgcctcaccggcttcgtgccggactgggtccacgactggtaccggatccgcctgcacctgcagcacagagccgtcctccgcggcggtcgagccgcgatcgccagcgcccattcacgcgccgagaaggccgtgacacctgacgatgacgacgccaattcagttgcgccaaagatcagtgcccagccatttggct

SEQ ID NO: 10360 - DNA, 508 bp, Zea mays
tgtcggccgagggcatcactgtgcagtccttcaacgccgatctgctgtacgagccgtgggaggtcctcgacgacgacggcttccccttcaccatgttcgcgccattctggaacaggtgcctgtgcatgccggaccccgccgcaccactgctgccgcccaagaggatcaattcaggtatccaaatgcatttgcctacagagttctaatggccacactggatgacgtgaaaaatgctgagctccacaggtgacctgtcgaggtgtccgtgggacgagctcatctttgaagacgagtccgagaggggcagcaatgcgctgctcgcgcgagcgtggtcaccagggtggcaaaacgctgacaaggcgctaacggccttcctcgacggtccactggtcgactactccgcgaaccacaagaaggccgacagcgccagcacgtccctgctgtctccgtacctgcacttcggcgagctcagcgtccgcaaggtcttccaccaggtgcggatgaagca

SEQ ID NO: 10361 - DNA, 490 bp, Zea mays
tgaacagcttgcctgttcatttctccgaaatgattccatataagtctcacttgtctcaccaactacatcttcaacatctttttgtcgttcagccattagattcttcacacagccagtgtcttctaataccattctggaggtagtgtatgtaccctcacaaaaggcagaaaaaccattggacactgcccttgacaaaaattcatcaccacttatggatgcagatgtgccgtccaaaattaaggatgactcgggtacacatgacacgtcctgtgacataaatgtatcacaaacttgtgaaatggacccatacatgttgctttcaggtggattttggaaagaatcagcaatttcacatgtctctcgtgattcaacgggaaaatggaactgatcagaaatcccttgcccatgcataggaggcacctctgaaggttgtgggaagaaaccaacttcagtaacagtaaatatgttatgtttttcagtacctacatca

SEQ ID NO: 10362 - DNA, 436 bp, Zea mays
tgcaaatgttacaatatttgctttttatataaatggcagatacacatataccttcctttctaggagaaagcgctctatggcgtctgacgacaacatacaagaagcctgccaagaaatacagcaccctgcatcctaattagcaacacatgtacgtgcatgctctattccacaagctctcaggcactggctggaacggatgcggggtcgatcatcccagccagaaacgcgacgaagatgcacaccatcagcaggccgattatcgcagccctgatggcgttctcgcagctataaggtgatgggatctcttcttcatccaagtcgaagtccaagtctgtgacaggtgacccgtcatcaacgctgaccaagcggggctgcttcttgctccttcccctacctgtatcactgaatcatcacgaggactctcacatcgcaggca

SEQ ID NO: 10363 - DNA, 474 bp, Zea mays
tgacttttgccgtctgtctgtgacagaggaggaggaagaggagactcggtccaagccgaccgactccgatatttcaggcgcagccattgcggtaggcgacgaccacgccgagagggtgcgcaggccggtgtgctacgagtcgagccggcggtcggacacctgcgaggcggccggcgacgtgcgcgtggtggggcgcgcgcagacggtgctcgtgggcgcgctggaccgggagtggaaggtgaagccctactgccggaagcacgacgcgttcgcgctgtcccacgtcaaggagtggacgctccgtccgctggtcggcggcagcgacggtgacgaggcgccgcggtgcacggtgaacagctcggccacggcgttcgtgctgtccacgggggggttcacggggaacctgttccacgactacacggacgtgctgatcccggcgttcatcacggcgcggcggtacggcggcgacgtgca

SEQ ID NO: 10364 - DNA, 564 bp, Zea mays
ttcgagctcggtacccctggggcctcggctttggcatctctaccgcctgcatcgcgctggccttgggcgcattcgtgctcgccacgcccatgtacaagcgctcgacgcccaccgccggcaaggtatgagccggctctagctagcgtgcgcagtccaataccgcgcgcactgacgagtgacgactgacgagttctcgttgcttggcaaggcgtccgtcatctccgactccgagacgggcttggaagcgatatcggaggaggcgggctcgtcgcagaagctccgcgccgcgacgaaggcagaggagttcaagaccctgctgggacttctgcccatctgggcgaccagcatcatcgtctcctcggcgtacacgcagatgaacaccaccttcatccagcaaggcagcgccatgaacgtgtccgtcctgtcggtgcaggtgccaccggcgtcgatgggctcgttcgaggtggtctgcgtcctcatatgggtgctgctgtacggccacgtgatcgtgccggcgctgaggggatgcgggttctcgttcggcggcgacggcgaaccgtctca

SEQ ID NO: 10365 - DNA, 482 bp, Zea mays
tgttatggatcacaatttataaacaaaccatagcccaggattcaatagtcgttgaagcacaaagcatgtgtaaacaagattgaacaatcaaggagatgaatatatcagcagtcctatcttccagctatattacatggctactgagagaatttagagaaagcacaaactgaatgttatgttaaaaaattatttagatactcgagattagagtttaacttcttaggtaaccattcatggaaaatacaaaatccatctcaaaccaaaataagtattaactataagaacagcatggaaccaacattgctgtgttattatatttctgtgatgaaaaagaaacccatacatttgaaagcctatgattctgtattggaaactactacacaatcaaaagttctacttaaatgagaagagcataataccaagatcagctagtgtaaagaaataaacagagcagtggaccaaccttgttaagtgtgcgaaca

SEQ ID NO: 10366 - DNA, 519 bp, Zea mays
cacttgatctttcccaccactgcatgctgctaggttcaccttcttaatataatgatatgcaagttcacttagtaatgacagagatgtttttttttctctcgaacgcgcaggagagctgctcatcattatattgagaaggaaaagagttaggccccaaaaggaccaatacaaaaaagctgccttacggcggccagaaacacaaaaaccaaaaacacaaaaacataaaggaatttattaagcctaacccactactacaacataggcaagccagcaaccaaccttggcacaggagcagtaagaagagagacccttagcccctgccatcttccagagcttcccttcttgctctgccttggaaaagagcttccgccgtattaggcctcttcatgtcaaagacacaatggttccgatgcttccaaatggtccaggctcctaatatggtcagagttcaatcctttagcggcaactccgtggacctgattagcagcccttttccaccaacctaaccaatcatcatcc

SEQ ID NO: 10367 - DNA, 527 bp, Zea mays
tggtgcacgttgatggggtgtacgaagagcccggtggggtcgctgaatatcatgctcgcagcgatccgcgacgcggcctcggtggtgtggtaatcgtcccagaagaggtggttgctgcggttcgggcacaggggagccgaggagttgcacccgtctgctccaaactgccccccgccgcagcacgcgatgtcgagcaccgtgaagtctgtcgcagatgaaagagacggagaactgacgtgagaatgaattccagggcttgggaacttcttttctattacgggatcgggaggagctgtgagcctgatgtcgattattactgtaggttggcgtggcggggctctcgaagacccactcggccatcttgatcgagttcaccaaggagtagttcatgccgggcagttcctggctgaggccctgcagcatggcgtcgaacatggggtagagctggccggagaggttgttcagcgcggcgaagcacccgtacttgtcgatgcccttggggttgctggggtcgtgagctatggcca

SEQ ID NO: 10368 - DNA, 450 bp, Zea mays
tgtaaataggatattaaaacggtaagtagaacacagtagaaagggggtgtttagaacctaaaaaacaaaagaatcaatgaaccagaatgcaatatagagctcatatggtcctatctaaaatgtaaaacattgaaaccagttagctgtatctctgaatactaataagataaggattgaacaataagcgagcatcatgctgctaaaaggaagtggtgagcttaaagataattttgtacattatattatcatacaaataaaattgatgatatacaagattaagtttttttggtacttcacatataaacaggatcctcaagttgttgtgttctatagtgctaaaaaattctaaaaaagtaaccattccaataatggttccataccgacgattgagaattgagatgaggcttgaattcaaactcccgagagcctccatcttcttggccactatca

SEQ ID NO: 10369 - DNA, 504 bp, Zea mays
tgtaagcttccacgctcgagatctgatcagagggctgcttgtgaaagagcctgagtaccggcttggctcgtcgagaggagccactgagattaagcggcatcccttctttgaaggcctgaactgggccttgatccggtggaccgcaccaccagagaccctgaagaacattgacactgcaccaacacctgcaacgacacgcaagaagaaggaaggcaaatgtctggaattccggctgaatggtgacgacatcgagttcgagctattttagttgtagttgtagtggcatcgctgttgtagtctcaaggatatatcaaatatcatgataagctagcaagagtagtcttagtccctcttccctgcagttttctgttgaaagttagtcatcgttgggaagtaaggtaagattggctgttaggcctgtaactttatgccttgttaataccatcaaatattagaagacacggttgggaaattcctgggcatgtgcgagatgctgagatgcaa

SEQ ID NO: 10370 - DNA, 495 bp, Zea mays
tggatgaactttgctgtgtttatcaatgcttggaacttgtgttctaatgtgtcagtgatccctggaactgacaaaagcagcccaaactcctggtggatcgtggataacctcgtcaaaacttgcatagatgagcagttggctgataccaatcaaattctgacatctccaggaagcaatattccacttctagcgtggatgatgacagagcccatttcctggcaccttcttgtaatccaatcctgtatgagatctatggctccacaagggaagaagaagaagaaaggcgggccatctgagcgaccaaacacacctcacctgcaggcaattcggagctccgttcagtgcatggctgacactctccagagagtccagaaatgtctgtcagaacagatgaagccagaagagcaagctctagacatgctggtgtcacatttgcaaggaaccggtgccgaaggccctggacagatcgcccgtatcttggacgagagcgcagca

SEQ ID NO: 10371 - DNA, 513 bp, Zea mays
attcgacctcggtacccctgcacgtacggtacggtcaggacacgtccaacaactagcggccactgctgcctgctgtatacattttttacctttacatctcgagaagttcaactgtggtccagtgcaggccggacggggctttttgcgagagaagagaagccagcgaaaacgactgttcaggtactgtacattcacaaacaaaaaaaaatttaacgtgacagactagctagcacgactggttaattaatgtccacgaacgattgaacgaatgaataatctctctaccctacggacgttttgctttgccggatggatgcgcggtgaatgcgcgtgcttgctctggcagctactccggccggctccccgcgccgcgcgcctcgccgcatgcatcgcagcgtgcgtactcctacgtgtcgacgtggacactagcactactactacagcgtactacacgttaccgacgtacacgtacgcacccacaggcgcttgagataaggggtcgcaggcctagca

SEQ ID NO: 10372 - DNA, 496 bp, Zea mays
tggggccctaggctcaagaaattctctgctgcattgcatgtctgcacctccaggtaggccagtacaagctccggcaagcaacaagaccactatctcctaccagcaagcagctacaatgcgcagtgccgcattgcaattgcaccacacaacctgcagagtatcaataccaaacagagacaaaaaaaaaagaaattgttatcattaacagttcaatctgcacagcggatgcaactgagccatccttcttactgttcaactttcatattcagcaaagccaacggaatcatttacatcctttacctcgttgacttcttaacaaatgaattatatctgagagatgactgcctcccacttaacaaattgggcaaacagccacccctgttctagcaccaattttgctgtacatgctaaagggatgcaatataaaataaaaaacaaaagaaacaatctccacctttcaccattctgattaaaatgacatgctatgaaatttaca

SEQ ID NO: 10373 - DNA, 452 bp, Zea mays
  unsure (1)..(452): unsure at all n locations
tgtttcctctcttcctcttcgccctctgctcctccgcagcagcgcgcgcgtatacctgacctgtacgcattcagcagcacggcatgacgaaggtaactaaaacggactatagcgaactggcaaaccctacccttccagtgtctctctgctccttcgttctgcatgccctgctcgatatcgctctctgtgtccccgtgctcatcgctctgctcgccgtctcgttgttattcgcagcaaaagatagtgatcaagctcagcatgccatctgagaagagccggtccaaggccatggtgctggtcgccagaacggacggtaagcatcgcatacgcaaaagcatatgtnnntccacacgctttaataacgcggttttgttggctggaattctaacgatccctcccatgtaatctgcaggcgtcagctcgatggagatcgccggcgacggcaaggacca

SEQ ID NO: 10374 - DNA, 14 bp, Zea mays
tgtgtgagctgctg

SEQ ID NO: 10375 - DNA, 14 bp, Zea mays
ttgtgtgggctgct

SEQ ID NO: 10376 - DNA, 17 bp, Zea mays
tcgctgtgcctgtgcgt

SEQ ID NO: 10377 - DNA, 17 bp, Zea mays
cggccgtagcccaagtg

SEQ ID NO: 10378 - DNA, 18 bp, Zea mays
gagtttcgccctctcacg

SEQ ID NO: 10379 - DNA, 19 bp, Zea mays
accmatgcatttgttgtgc

SEQ ID NO: 10380 - DNA, 25 bp, Zea mays
ctgtgcctgtgcgtgcgtttgtgtg
